United States Patent Application Publication US 2011/0183924 A1 - sequence listing, part 260

SEQ ID NO: 735325 - DNA, 188176 bp, Homo sapiens
ctccaaggctgagggatgaggagacctgctgaggacccagggccttatctttccatcccactccataggtcccagtattgactgatgctgtcttcacctcctagcctcacttttaaccttctggcacccgcccaccactgtccagttcactattgaagccctgccgtccagtgctgcagagggaaaggatgttcttctactggcctgcaatatttcagaaactattcaagcctattattggcacaaggggaaaacggcagaagggagccctctcattgctggttatataacagacattcaagcaaatatcccaggggccgcatacagtggtcgagagacagtataccccaatggatccctgctgttccaaaacatcaccctggaggacgcaggatcctacaccctacgaaccataaatgccagttacgactctgaccaagcaactggccagctccacgtacaccgtgagtgattcccccatacctctgggtgctggcggtcagttctgcttcacacacatgagattgtcaggcctgggctgtgcctgcatccccctctgcattttgtcccgtgttgagatttgggcatttagtgcaggacacacacatggtaggtaaacttcaacagatcagaattcctttcctgcatccaggccctgcagacactgatggcgggggcgggggggcctcagcagggggaggtcagtctcagccaagcaccccatgccctccccatgaacctgaccctgagaaagaccctggagaactgggtcagggcctggcctgagggcgtcctgggaacctcacaaaagcccagcctcaggactcctgactccgtgtgaccccgggaagcctgtgtcagggctggggtgtggtctcctgggcagggcttactgggagcaaggatttaccagatgtctgcgggctgtggttcctgaagcttctcatcagtgagggctcagctcccagagtctcatctagacaaggacagagcctaccactttccctgggactcagcctggagagggcagggggacaggattactagggcattggccccctgaatgaggagcttaagagatgcccttgggcagtcagtggcccaggggtaggaacagaggggagaaaatgttcctggcagcttcttgtccaccggggatcatgcccaggggtgctctcccatggaggcaaataacagatgctgttgatgtgaacacctcctctgtgccaagcttcatgtcagatcctgtgaataatttaaagttcattcacagacaaagtggcaagcctcagaccattttccatttacatattgtatggaggggaaactgaggcacagagagatacagacaccggccacggtgggcagatcgcagctggcagagtcacatgagggctgtctgcagctgctgccacgtcctctccttcatccctggtgccttactaggtgtctgtggaccttagaacagccactggttcggatgttttcttcttaggtgtctacagctcggagggggagattctggtctggagagttatgagtaaatacagaattaatcagttttttcttaactaaatcacctgcctcaacaatcagtcagtgctggggaagttcaggcctcctcgctcaggtccacaccccgcatctctggacatgaaatggcttcgtgtgttttctgatgtgtgggtatcattccaacaggaggataaaggggaggactttgctttctctccccattcacaccctgcaccagccagggcccagtgtgagacacatactccgtagttctctcatgaaggagggagggaatgaatgaaggaatgatctataacctcttcagagacagagacctggatacaagatcctaggaggttctgggcccaacgtgagacacacactctgtagttctcttatgaaggagggagggattgaatgtaggaatgatctataacctcttcagagacagagatgtggatacaagatcctaggaggttctggccacacctgttttctgtccctctagagcctaagacccatgtctcattcatctggcccgtttctcctaaatctgcccctgggagctgagtctcatctgaccctggggctgcagggctgtgggaaggttttcaggggagggatcaggcttgcgggtagtcccacacgtttgccttacaccctggagctctacctggttctcactatgaatatcccataataatcccccctatcctttctggggagtagaaaaaaagtaaatatttaaaaatatgccagagcatctgttcttcttagcaagttcagatagttattagttagcaggaataaatcgttattttaccagagcctcacctgctgggggtttatgggagcctaactgactgaggggggtgggaaatatccaactccagccccctctagccatcatgtcccacctaaaggagagaaaaaactgagaggcacttgtgacattcacagcccagggcacagactctatccaggaccacagaacccctccctccccccactcaccaccgcatcactgaacgcctgctcacccaagttcctgttgcccagtacatcatgtcctggctttcaacaaaaactacaagacagactagaggcaaaaaaaaaaaaaaaaaaaatgcagttcgaaagacagaacaagcatcagaaccagatgcagatgtggcagggatgtggcagggatgttgaaattatcagaccaggaatttaaaacaactctggggccaggagcggtggctcatgcctgtaatcccagcatttgggaggccgaggcaggcagatcacctgaggtcaggagttcgataccagcctggccaacatggcaaaaccccgtctctactaaaaatacaaaaaattaggcaggcatggtggtgggtgcctgtaatcctagatactcggaaggctgaggcaggagaattgcttgaacctgtgaagcggaggttgcggtgagcctagattgtgccactgcactccagcctgggcaacagagcgagattccatctctaaaacaaacaaacaaaaaacaatactggctaatatgctaaaggctgcaatggaaagcatagacaatgtgcagaacagacggatgctgtgagcagagagatggacaggctaagaaagaataacaacagctactatatctatctatctatctatctatctatctatctatctatctatctatctatatatatgtatatatatgctagagatcaaactcactgtaacacctggatctcagagtggttgtgaggatgtttattaggagattaaagagattaaagcagagttatacacagggcgagagctcaactgatgctatcaactagtattcttatttttttgatgttgttattggcaataaaatcaggaacaatgcagtaaaaatttggttttatcatgtacgagttctgtgaccttccttgacttactgaggtactgtaagtctcagattctaactctgcagatggcggtgatgcccctctccctcaaggtgatgtgaggatgagatgagctgtaggtaggttggtgcccactgtgcctggcacatggaaggcccctgaaaatagtcaatgaacatcatccccgctcatcagcatggagttgacagtgagggctcgctctctgtgacaatcatggaatggaaaagaagaaacaagaggaagactgggcgcagtggctcatgcctgtaatcccagcactttgggaggccgaggcgggcagatcatctgaggtcaggagttcaagaccagcctggacaacatggcgaaatttcatctctactaaaaatataaaaattagcctggcatggtggcacaaacctgtaatcccagctacttgggaggctgaggcaagagaatcgcttgaacttgggagatggaggttgcagtgagccgagattgcgtcagtgcactccagtctgggtgacagagcaagactccatccaaaaaaaaaagaaaaagaaaaaagcaacagagggaagaggtgtgacatgagaggaagaagggatttaaaggtacaggagcagggcgaggtgcaagcacctgtgggagaatgtaggagttggtacatcccagtgtgtcaagtctgagacacagaaaatggtgcaaccgtggagagcaagggagtcagctatgaggacagcccaacagaccacactcaggctctggagcatttccttcctccctgactatgcccctgccctgcaatgccccttatggtttcccttggaacaaacttgggccttgtcccctttgccttcccctttctgcagaaaacaacgtcccaggccttcctgtgggggccgtcgctggcatcgtgactggggtcctggttggggtggctctggtggccgccctggtgtgttttctgcttctctccaggactggaaggtaccgcagcttttccccagcctcctcccacccctaggctgaccccagtcagggaggagggagaccccgccctgtattcagggccaggctttccgcatcctcccaaggaatccttccctctcattccatggctcctcccttgccagctgctgatcctaggctgcctcttcctttatgaatgtggcacagttaaggttgcacccctgagtgctgtcctagttccctaacacagcaaagccacagctgcctggagggaggaagggagggagggagggagggagataagacgggagtgctcagaacctggtaccttctgctgttcattgaatttacccacccagtgaggagggatttgcaggcttgagatccatggtgggggtcctgggcatggtcacgcagtggggagtggcaaagcctggacaggctgggtagggtcagcaccccatcgtgattgatgtccctgaggtgtgagatgggagaacctggacctcaggacctgctgtcctttatgtctcttgccaaggggtggagagagagaggacaaggccattgccccatttcagcatctccaggcctgaaaggagggtctggccatggcagggatactgagttctgggagaatatgatacatgctccttgcctccccatgcccccagctcccccagtgtcctgcacacacagccggccctgctttccctctggggccttgacccttcctctcaggcaaacgcaggtggtctgattccctccctgagtcctcagtccctttcctgggtccctgggtcaatgttctcctcacccggcatctgcctgggggggtccttcctctctggccaggacagacgtgactgcttaaggcctatcctcagctccccgtcctcggccgctcctaccacgaaactgatggagacaggaggccttcactccagtccttgaaaatggagtcccttccttgtcctttattctgcccctaaacctgtgatttctccctgcaccctcatgaataatcctgacctttcctagggccagcatccagcgtgacctcagggagcagccgcccccagcctccacccctggtgagtgtcccttcagcccaggtgtgggagcccctaggcctgccctacggtgtccactcctgccagtcaccccctgggggcctctgaccctttctttggggctgcaaggaggatgtcaggaaacatgacacaggggaccccgactgtcttgttcagactgatctgtgggctctgggtcgtgggtcacctcctcgacctcagctgctcaggtctcccctgggaagaggctccctctccctgattctctgggagctgaggacccctacactctcctgcaggaggggcccaggctctcctcccaccctgctgctcactcctgtctctgtccccaggccatggtccctctcacagatccaccttctcggtaagcctgttccctccccagcccttttctactggggtcccaacagtgcaggctcagggcagggggaccatcaaccccacagcacagcactgacccacctttccccagaacagtcaggtcaaagtgagtgcctccagccaggatccgggcctctctacagggccaggaccacccacgccatgtgctgacccctccccgggaccctctacacctgaggagaaccctggagtccagcaggtgcagaatggacactgggaccatcagtcagaggcccacattaacaagggtgcggggtgggcccagccaggacaggggtcagggtgttgtgtccacactgggaggctgagctcaggggcagagctggtcaatcctgaggggaaatgagtggaagtggaggcagggaagtaagtcctggccgatcagagacaggaaccttccaggctgggcttccgtgaccctccctccctgtcccctgacatctcctctctcccctgcccaggcccctctacccagccccagaacagccactcccatctatgaggtgagtgtgggccatggatgttctggtcccgcaggctccaggggacccaggatctgcccccaccagcacctggctgagctcagattcaggaaaatgcagtgaaaatgagaacaggtggtggtgagcagaggagggaggggcctgggaacagggaccccctgagcacagccaggttcagccccagagaagccctgggtgggcccagagcctgggagatgccagacactgttctgagaaggctacaggggttgaggcctcttctctgtttttacaggaattgctatactctgatgcaaacatttactgccagatcgaccacaaagcagatgtggtctcttaggttcctctgggagctgctcttgtgggttgatggagcgtccccaaagctcccagccctggggacggggaaggacatggagcctgagccagagaaccagctctgagtcctgaggagacacaggcctggggacagggagggatgggagtccctgctgaatatctggagaccctgacaggttgccctgggctctgggtgggccgggacaaaggcctctcatcaccacaggaagcgggggcttgcaaggaaagtgaatgggcctgtggcccacccggggtcaccaggaaaggatctgaataaagaggacccttcctctcattggctctttttctgctcacgggaacttagcagaaactcacctgaaactccgtgtccattctctcccgggtcacacagggaaaatatctccaccttgtctcaaccacagtctctcttccctgggaggcagaaataggggttgggagtcaggctggggtgggccctacacaggaaagggcaagattcacatgagccctgcccagccagccgagcgctcagctgtcctcacactaccccagggaccaaggccatgcacagccccagcctgggtccctctgtgaatgcatgtggggtctcaggagcacagaagatggggccatctgatgtccacaaaaggtgagcaatgcgggagcaaccatgggtggtataggttgcggctgtggcccctacgcagcctccagtgtcctgacccctgctgccctcttcacccaggccctggaggcccagtctatcactgtcctccacaaatgaacttacctgtccccaaatccaggatcctgtgtgcttatacctggccactaggttctcctctgtcccagtggctactgctcaggacatctttatccctggtggggcacagagaggggctgtcagagcaaccaagattaatacagacgcataattcagtccttgagcactacccaggactctggcccctcattgctcatcagttcccactttaccccctggcatggatctcactgagcaagccaactctttacacaggagcatccaggtcagaggtgcaggactcccccatctaaagctcatgcaggctcccatggcgatgggacaacctgtctgctcctctccctggcccacagccctatctcgcctgcagctcctccacacacctgggacagcagttctcagcccttccctgagggcccctggaagggtgatgatctcatataggttcacttgaaccaggtgccaccttcccacaagtgagctggtgcctgcactaaagcacagagccacagttcccaagagtgttctgccactgccacaggtcccaagagtgttctgccactgccacaggttgttcgtcctgagatgagaggtaagaaaacaacccgcaatgggttgttttatatcgggatttgcatcaggatttagctctaaatgacccctgatcccacctgcacacagcgtcagatgagacaaggtgaggcctctttagttttctgttgaggctgtgacaaattaccacaagcttagtgacatagaaacctgaaccaaagtgcccacatggctgtgttctttctagaggctccagggaagagtgcatttcctctccttttccacctcctagaggcctcctgcaaccttggctgtgtcctctttctccatcttcaaagccagcagcacagcatcttgaaactattctgtgccctgcttccatccccacatctccacctcctcccacctccctctctcacttaaaaggaaggagccttgtggttattttggacgcacctgggataaaccacaacaacctccccatctcatgatccttcctttaatctgtaaagtgtcctttaccacgtgacatgtccacagatctggggatgaggatgtacacatctttgagaggcccttgttctgtccatcactcctctcaaggccatcttctcatcatcgttcactacaaactacacatgggcacctggatgggttcatcatgactgtggcgtcagttcctgcattaacatccccagcaccctccagatcctgagagagggagacggagggctctccatgcccctagtacctctccaccttcttcttggtgacatgcttagttgctaagaataacagaaagcggaggtgactgaaagatcacaactcaccggcccttcaatagttcgtggacatcagcaccacggacagtgactcagtgaggctaatttccaggtggcagcagggagcatgcagataggagggaactgcaggaaaagctgcccattctattctatatgagaaagagtgtaagaaagaggaagctattacagggataatgctattcttctctaatccataaattgcgaaacctttgcatgtctggatatcatggtttttagcacatctgctgccactccctgcagggctgattgctgcatccaggatgtggtctcttggggggctcacagcctgctttggcctcatggtgagtctccctgcccctgacactcaggccactgtctctgcctacaacatggtgggaaccttccatgattaacgtctgattctctgtgcctgacctttgaagcacatccatcactcagcctggagcatccgctgagctcagcatcctgctcctccatccccagctgagcccttgaggagatgcttgagaggatctcctgggctcctctgtgagctcctccaggctgagccttgtgcttggtgtcagaggcctttgccatctgcttgttctttccataggcaaataatcctcctcagggacaagtggggcctgaagatctgtctgaatatctatctatctatctatctatctatctatctatctatctatctatcatctatctatatgtatgtatatatgagaatgctttattaggcaaaactgcatactatgaacatgctttaaaatgcaacaggatgagatgtgaagacataaagaacaagtgtgtagtgacacatggctatcagaacacactgaagaatccacaccgcggccgagagcagtggctcacgcctgtagtcccagcacttttggaggctgaggcaggcagatcacttgaggacaggtgttcgagaccagcctgaccaacatggtgaaaccccatctctactaaaaatacaaaaaatttagccgggcctggtggctcatgcctgtagtcctggctgttcgggaggctgaggcaggagaattgcctgaacctgggagacacaagttgcagtgagctgagatcgcaccactgcactccagcctgggagatagagtgaggctccatctaaaaacaaaacaaaacaaaaagaatccacactgcttccccgcttcactttacccagaaaaggaatgttctaggccacttcctcttcagcacacatccccagggaactaaaataggttcacagtcacccccatcttcctcattcccatcacctcttacccacagaggcatctctggtcctacagatccagccctgccttcaagaggcacaggtccaacccatccagtgtccctgctagtcacacacagcactcagggtacaatggagggcttctgtgctttggatgggaacaaaccccacctcacattcccacacctgagaagccaccagggtcctctctgtcctgtcctcacactcaatgtctgtcctgggtcacccttgtcatctctcctggaaataggcatggctcctgacaggtaggattgaggctttgtcttttcaggagtccctcccactctgagcacatgaaactgctcagctccatgcaaccctctctcaccaggggccttgttctctgggtccctgaatacctgggtccatgccatgtacattttaagaaaaatgacagtgactctcaccctgacatcctcacccaaggcacgtgtctgacaagaatcaccaggtgagatacctgtggctccacacacctgaggcttcactgcgcaggggtgtcctcatccctctcctcccacccctagggacagtaagcaccacaggctgccttggaccaccagctccccctcccagacacagcctcagatctatactgacatgctacatggagaggctctgatgaacagcaggtattaggaaatcccaccgaaccaggtgccacttgcggccccactcctcctcatatctgtgactgggacagacacacataacacacctctgttcaccgcccagcccccaaggtcaatcacagtctgcttctcccctagatccactgctccccatgtcttccgtcctcagctgcatcctgggtggcctccttgctgttcttgtaccccagaggcaggttccaacctttgtgatgttgcctgcaatgcccaaactttcccttccccttccccttcccttttcccctcccccttcccctccccttcccctccccacccctatcccttcgtcttcccttgtcttcccttcccttccctataaagccaaacatacccatccacctaccttgtggtcaaagtcatcagcctcctgctccactcagtgttctctgaccctgcatatggaggtggtggcccctcctagaacacccaccactcactgtcagccttgcgtggtaatcacagattttgcaggggttacctgtgttcaggtgtgtcacctgtggaaccagaactcttggaaggactggcagagggagctgcttaggatatctcagggctcctggcatctggtctaccacagggctattaacaacagcacttagggacaaggtggaggatggacggttaagagggtaaatatggatgatgtgtgggcaaagaataggacacaggaacacatgcagtactcaaataattatgccaagaaaggtgaggacatggagatggacattcccatatacttctgatgggactgcagtttagtccctacagcaacattgacctcatcatgtttaacgcgcacacgctctgaccactatcctacttctgaaggcctccctgtgctgtgagctctgagaaggccaagcttgcctgttctgtctctgctaaagccagagaccagccaatagcccagcacagggtacttcataaatacatgttgaaggaatgagctccaggaacagtactccacatggtagagatgtgtgtatgaggatgttcactgcagaaggtcatgtcaatgtgacaagtgacgagcagcctcaaatccagcaacaggggtgtgggtaaaagatcatagtgtagccatgcaatggaaccaatgaaaaaaccacaattagagcaaatccacatgtattaataaaggaggtgccctccatacatgctgcacctaacagaatgttgccaaataagaatgaaaaatgatgatatttgggctgtaaaaactagaagtcagctaaataagaatgcatcgaaagtatttgtgaatgcttacaattttataatgccttggcatccgttttggatggaagttggactttctcataccagaagcagggctcagtcacctttgaaatagtttccagttctccacctccttccagttcctcagtgtgattgatcagatatctgatttatacaactgcctcctggtgacctcctccctatgggacttccggatacagcccgtatgactgccccactgaccccacaccctgcctgctgcagtgaccacctctaattacctggatctcatgtctgcttgcattaaatccaccaattaaaactccctgaggacaatctgtttgaataatattctgtaccctaataaaggccttgacccatgggttccccctctgtcctccccatactgcccctgacctctgtgtgtgtgtgtgggtgtgggtgtatgtgtgtgtgtgtgtgtgtgtcctccagacagggcctgtatcccccaggacctgtaagtaataaatctttattttcatcttatgtctctcgcaatcattggcaagagctctgcatcttaaagatcgcaaatttaagaaattggtgtagtcggcacaatagagtacctcttctgtttagcacaagatatctcggagctgctgaggcttttaacatcctcgccggtgtggctgcctcactggtgaggccgttctgttcagtgcaattcagttgctccactgtgtgctgctgtgttgctgctgtagagtgctgccatgttgttctccccaaattgttaccgagtaggaacctgtaatgtgctcccaaggtggtctaccccatgagaagggggattctccatctagggcaagggctaggtgtgtttctggaatcctaatagggaaggcatccacagagggtgaactccactcctccttagagtgaggagtgacatttcccatttattttccccatggaggtgccatgtattgactttttctttcactgtcccaaggttgagccaaggtgagctatggagaccagggcaagataccatttctgttagcaaagcaaatgggtgacaacgtgtggagaagctgtggttctcctgatggatatagcagagtgccatttagtaaaatcttgtcaggaggctgcccctggttagaccggcagtgtctgtagtcactaaggtggatgcgaattttaggccctgggccatggataatccctgcagacacagccgtggcttcatgtgatggggcaatcccgggctagtggctcccttgtttctgcatttcttgctgtggttgcacaatcaacacctcaggggttgattgggtcaccttggaaagagaaacagctgcctaggaggctggtgcacatggaggccaccctcaattttattctgctaacaagttgtaagattaaaacaacagggggctttgggtaccatcaggaacttgtcaagtaaacatccaaagacagaaagaagaaaaagaaaaagacattaaccgtctagaaatacaagccattttaaagattttgcttaaaagatgcgcttgggctgggagcggtggctcacacctgtaatcccagcactttgggaggccaaggtgggtggatcgactgaggtcaggagttcaagaccagcctgaccaacatggtgaaacctcgcctctactaaaaatacaaaaaattagcagggcatggtggcaggtgcctgtaatcccagctacttgggtggagaatcgcttgaacccgggaggcagagacggcagtgagccaagatcgcaccactgtactccagtctgggcgacagagtgagacttcatctcaaaaaaaaaaaaaaaaaaaaaaaaaagacgggcttgtttcgtcgttgtggagtcatcccagagagaggctactccctagagtcactgaccacctttcctcctccatcttttcctcttatcattctagagacagaaaacaagaatctcagctttaggtggctaacctcaccccccaagaaaagaaactaccactttgattgactacaaatccaagaaaaataaaagagaaactttaaaaagtactgagcaaaccacaggtctagcaaacataatgctagccctaggttacttattcatttacaacaaacccctagatataggaggaaaaaataaaaggtaattaaatatatacacatacaatattttaatataaatatataataaatagttaaattatgtatgtataatatgtaactaaatcaaagtaaaatttcatactttgattctattggaaattcaaaattcatttattaacttatatattaaggaatttatgtaaaaaaagatttttaaaagggcaccaatttgcttttgtgtctctacaacataggatctaatttaactttacatttgctaaatacactaattgacaaatattcatggatttaatcaatactggggctcaaattgtagccacacgtgggaatcccataaatttaaacactctgtccctattatcttgagaagaaaactaaatataaaattgaaaaaaacaggtatgtctcaatttacctgtaactttgcctaaatttcccggagtcatatacccattgctgtaaaacattctctattggacataggtgctctgagacaataaataaaatagaagtgtttttggtacttagacattggcttgacaaaatgggatcccatgaaacctcagttaagatagtgaatacggcccaatgtgagttgaaatggggcctttaaggattaaaacttattacatgaaacctagtaagtaatggggtgattatccatactgcttctccatttcatagcccaattttgacagttgtcaaatctggaaaaaacaaacaaacaaacaaaaaaacccctgggaatctgttgcctcacagagacacaaagtagacatcaaaattgtatatctcagttccagttccaaaatggtggcatagaagcaagctggctttactccttcacacagaaaaccaaaaacaaatatacagcaccaaaattattaccagatatattccagaactcaaatatgaaaatgaaacagttttcagagccacagagaagtgaaaaaaactcccgacagatgacaaaagaatcagatttccccatctgtaatgtccctccctgccccattctgcctggtaccaggtgtgtggaaaattttaccccaactcatggtttctacactgggaaatgtaagatcaatgcgggcaaccagtttctgcacaatcctgggttccctgtccctgccttaacccacaagaagcattgtgagtgcccgaagggagaaatttccctgaggacagtcaaagagtggggaggcaggactaccatctccttccctggaaactctgctgtgtaactcagccaagggagacatgaaatcagactggtgtttcagcagctccatgttgtagtaggtttgtttcacaggtatcctgggcatggacatctagccagctttcccacactgccaggatatcccctttgggacctccctcagttaggaagggcacactctgatcatttactagggccaaggtaaaccctaaaggtaacttagagatgaaaaggaggtagtgacctagcagtaaagaactctaagaaaatctatccaataaaaatcaaaacaagccagacaaagactaaaataaataatgaatccttcaatgtaaagacctggacttacatccacaagaaacagtaagcaggtaaccatgatctccccacatggacaaagtgaggaacaagtgactgatcctgatgagatggtgatgtgtgagctctctaatcaagaattcaaaactgcagttttaaggaaactcaatgatcttcaagaaaacatggaaaagcagttcagaaatttatcagagaaatttaacgaagggattgaaataatttaaagaaaacaaacaggaatcttggaattgagaaatatatttgctgaacaggaaaatttattagagtctctcaacagcagaatggatcagaggaaagaatcaacccaaataagactcccccaaggcataaaataatcgaattctcaaaagtcaagggcaaagagaagattttaaaacagaaagagaaaagaagcaaatggcataaagaagctccaattctgtggcaacagattttcagtggaaatcatacagaccaggagggagtgacatgacattctcaaaatgctgaaaaaatattgacatttgagaatactttatccagtgaagttatccttcaatataaaggagagagaaagtttcctagacaaacaaaagctgagataattcacaccatcagactagtcttcctgtaaatactaaagggtaaatactaaatacttcaatgtgaaagtaaaaaaaaaaacactaacatgcaaaacaaccacaacaacaataacaacatttgaaggtataaaatccactggtgaaattaagtacgtagacaaacccagaatactcaaatagtaattgtggaaagtaatccaatcataactctagcatgagtctcaaaatataaatctatcaaaaacaataatacattttaggaggccaaggttggcagattccttgaggtcaagagttcaagaccagcctggtcaaaatggtgaaaccccatctctaccaaaaaatacaaaaatttgcagggtatggtagcacatgcctgtcgtttcagctatttgggaggctgaggcaggagaattgcttgaacccaggaggtggaggttgcagtgagctgagattgcactactgcactccagcctgggtgacagagggagactctgtcttaaaaaaaaatagctacctgtttggagaaaggtaatataaaatatgtaaatagagacaaagtcaaaatttgcaaaggatgaaattaaagagtagagtttttttggggggttttctgtttctattattttatttgtgatctaagataagttgttaccttttcttctcttgaagatactttgttatatctatgtttttggaagtcttatggtaactgcaacgcaaaaaatctatgatagatccactgaaaataaaaaacaatgacttaaaacatactaccagagacaatcaaccacaaggaagacagtaaaaaatgaagaaaggaagaggggagttacaaaacaaccagaaaacaggcaacaaagtggcagtagtaagttcttacttaaaaatattgaacactgaatataaatggactctattctccaattaaaaggcatagagtggctgaatgctgcctatatgctgcctacaagaaaccacttcatgtaaaaagatacaaatagactgaaagtgaagggggtggaaaaagatatttcatgcaagtggaaaccaaaagagagcaggagtagctatactgatatgagataaactacaaatcaaagactataaaaagagacaaagaaagtcactatgtaatgataaagcgctcagttcagcaagaggagatgccaattataaatatctatgcatccaacacttgagctcccaagtctcccaagtatttaaagcaaacaatagtggatctaaaaggagagatagactgaatacaatattaattaggggactttaacaccctgctctcagcaatggccagatctttcagacagaaaatcaacaaggaaacttcaaagttaaactacacactagatcaaataggcctaactggcatttacgggacatttcactaactatctaactgttacagaattcacattattttcatcagcacatagaacattcttcagaacagaccacatcttaagtcccaaaaccagtcagaataaattcaaaaaagtttatatcacatcaagcatttgttctgaccacaatggaataaaactacaataaatgaataactttctggacacatacaacctaccaagatggaagcatgaaaaggcagaaaaacccaacaaaccaacatgaaactgtaacaaaaggaaaacccaggaccgaatgacttcactgctgaattctaccaaacatttaataagaactaaaaccaattctactcaaaatgctttaaaaaattgaagaggatggaacactttcaaactcattctacaaggtcagcattatcctgataccaaaaccagacaaggacaggacaaaaacaaacaaacaaacaaacaaacaaacaaacaaaaaaacactacaggattgcttgaggccaggagtttgagatcagcctgggcaacatagtcagaaccaatctcttaaaaaaaaaaaaaaagaaaaaaattagccaggcatggtggcatgtgcctttagtcctagctactcgggaggctgaggtgagaggaccaattgagcccaggaggttgaggccgcagtgagccatgtttgtgtcactgtactccagcctggggaacagagcaagatgctctctcaaaaacaaaaagcaagctgggtgtggtggctcctgcctgtaatcacagcactttggaaggctgaggtgggagaactgcttaagcccaggagttcaagaccagtctggacaacatagggggactccatctctcaaaaacaaccaaccaaaacaaagccaaaaaagaacataggccaacatcactaacaaacatagatgtaaaagtcctcaataaaatattaacaaaccatgtttagaaacacatcaaaagagatcattcactatgattaagtgagattcatcccagggatgccagtatggctcaacatatgcaaatcaataaatgtgatccatcacattaaagagaaccaagaacaaaaaccatataatcactccagcaagtgcagaaaaggcatttaataaaagaatgggttgagggagtggagcccatagtcagagcagcagtggtctgggattttggaagtagaaagaagggcagcaccactggccaggaccaccagggaacacccccataggccctgggtgttgtgctccagggagggttccctctggagttattaatcttggtgtccactttgcccagctgcccctcacagggtcagggaggatgaagggaaagcttccttctaatgaaagttcagggactcacagttcctagagcctgtagggagaggaagatcttcgaggaagagcacctgggcattggggcgtttgagaggaagatctatgccaggtccaagtggacaacctgtggactctctctccagggacatacgggtatctgggaatctcctgtagcttaaagaggtaaagacctctccctttagcctgaggactggaggatgctggttcaggtgaatgagtcctgcaggggctggtacaggcctggagggtggtggtgtccagggccttgggttcacccttagcatgattcaggccgggcggtgtttcacatgagcaagagggcctgggttcattgcttcaggacaatggtgaaatctcatggtggaagaaatcttgtccttgccagtgcccagctttcatttggtcttggcccagagtgtcctccctagagaagactcttgtcccttcttcacactgcccttcagggatatgccagccttatgggataagatggggtggagactgtagatgtgggtgggaatctctccacagagtgctccttctctcagcggttgcaccttgtctcagggcttcagcttgaaatctgggatctccaagcccttccctccccagtcctggccaggaccacatgggcagatgcattgtgtgaagtgcatttcatttggggtgtcctctctgcatggcaccctcccgttgattctctttgcgcatgtcagagtgcaggcaccatccacacctcctgctggaggagggacggagctgttgactcctgagagctgatcatgtgttcccaccctcacacacaatcatggtccatcctctgagggacatgtgttgccaccactgtggagatggtgcaactgacagtaacaaacagtaaaatctggtactgaatgggaccttaagccaacaatgacaatgtcattccaaggtgtttcatttttattgattcaatgcaagtcacctgatttcattgactattcacaatagctcgataaagtaaatgcatcatcaccaccactttaaagaggaaaaaggtgcttgggcagtttgtgactactgtggtggctgctgcattgctctctggtaaagccaagtaggtggtgggtgcggcctctgggctgggatgatccaccctcctggtggtggcaggggagccaagctggagccatggcctgtgcagtggtagcagctgaactgaccgctgctgcaggatttgcaagctgttacattttgcgaagccatgaagcacataaaacctcaagtagaacaagtgtttcaaagtctaccaaaatctgccttcagagattattactacagaggtggatatgaacccaaaatgacaaaacgggaagcagcattaatactagataatgaatgaacactagtaatagtagggtaagccctactgccaataaagaaaaaaataagagatgctcattaacatgttatgctcttaaatcacgcagacaaaagagggtctccttatatagtagccacaatcaatgaagctaaagatttactgcaagatcaagctaaaaacagtaggtgtataatgaatttttaacttcatattagtttatgtatatgaatatcaagtttttataataaaatgcctccaaacaaagaatatttgatttagggtttaataacttctaagaggggactcagatgtttcctgtttcacagtcagtctgagagggtcatttttcctggagctgacctgggtggaggcctcacactgatactccccagcatcctctctcctgatggggtttatgctgagcatacagtggccctgggacagctccattctctccatgagtcacagacgctggtcatggaagatccactggataaggttccagagtcatctgtggggcaggtcaggatcacaacatccttttcttctgtgactctggtgttgctgactcagatggggtcggagccactgaccctgtggacaatcagtggaggtgctcaactgaaagtgggctgagggcacgtcttctcctccatccctgggtccttaaggtaactgtggaccccagaccaactgacacaggagctagaaagaaattatttaggaagttagtgagggtaagagcgtccttggcaaggtttcccctttaacaaaaagcagcccaagataattccttttctaacaaagagcagcctgaaaaattgagctacagatgtagatgagcaagatggaagcttgcacaggtgaattccagtaggtgtgccaatagaaaagggctgcctggaagccaggtatgttcaacatggagactccatcctcccttttctccattaccacatgtacagtaaaaaaccaggcaacatggcaccggccaggtagacaatccatctgcatgacaaaagatcagagtggggcagccagcaaatggcacagctggtctaaacaatctttcaccccctgtataaatcagacactgcctcctgaagctcatctataaaaccttctgcatttcactatggaagtggcaacccattttccccaggacccctctctctgtgcagagagctcttctctttctttcccctatgaaacttccactcttaacttcactctgggtgcctgcatcctagttttccatggccatgggacaatgaacctcgagtattaccccagatgaatgatgctgtttcacaatcactggttcagctcccttcttcttagggtttcacagctcggtggggagaataccacgcctcagtggtctggggagtgaggaacaaatgaagaattaatcagattttacttagaacgctatcacctgcctcaaccatcagatccatgttgggaatgtccaggcctcctctcttagatctatacccacttcactggacctgaaatcctgtgtttcccgatgtgttggtgtcactcctatgagaggataaaggagagaactttgctttctctccccactcacaccctgcacaagacagggcccaatatgagacacacactcgctcagtagttctctcatgaaggagggagggagtgacctcgagtgattctgccatctgtagtctgtgtaccctggccagtggctgtatcttcatatgcctcagtttcccctcagtaaaataggacacacaatgagaactaaaaataaaattctaattccccagtgaactgaaaggatggcctcttggccaagcggatcccagagttcctgatcatgacaggatgggaggttacacctcattacagcccctccctttggaagtttagaggtgacaactgactagcattaacgctaaaatcgagatcatgagactgacagaacagactctctgtggccataagataccaaattataaactcaacctaaggtcatgcaggcaagggctaagccacactttcctacatttaaagaataagctatgttctaacacagaattttctttctctctagcggctaaagtaacactagccttcgagataagcaatattgaaatgatcgcggctcatccaccaacactggctaactgacccctgttccaacagccacaactacacttcaattggacaggagactgatttcagtaactttctcctaataagagaccactgagcatggcctggttctgctggtatacagacacggtgcactgagtaccataatgcttgtttcatcttttgatgtataagacctaatttaatacatttaaatctgaattctccaccccaaagtgaacatggggtgcatgtagcatgcatgtttgttgatcacgcatgtgcgtgtacttcctttgtgagtatccatagctccacctataacctgttgaatatgtatacctggccaactcattcagcataaatctatcttccacattcccctcccttgaagtgcctgctattggtctctgctggaggctgcatcttctaccctggggaatggccagcctgcaggctgtaaccctgtgtaagaaataacctggttgggtgcagtggctcacacctgtaatcccagtggtttgggaggttgaagtggtagaatagtttgagctcaggagccagagactagcctgggcagcatagcaagatcctgtctcttaaaaaaattttagggaggagagtgaggatcagaaaaaatacctattggctattatgcttagtacttggatcatgaaataatctgtataccaaacccctgattacatatataacaaacctgcatgcgtatctttgaacctaagataaaagtttgttttaaaaactatctgggtgcagtggtgcatgcctatagttccagctactcgagactgaggtgtgaggagtgcttgagctcgggggattgaggctgcagtgaattatggtcccacctgtgagtagccacttcactcaaacctgggagacagagcaagaaccggtctctaaaaaaaaataaaaatagaaaaataaaatgaaaaatatatgaaataaagtctcctttccaaacgtacagatctccgatttttctgccaacaatgataaatggtcagtggcttgccatgttgtctgtgaattacttttaaaatattcacgatcacctgacctaaaggttggtaccaaggaaccgcctgaatacaccgtctctgattatttgcctccaacagagtgttccctgggcctgatctctggtggacaatgagctgctgggaacatcctctcttctctattcctcccctggggatgctgaccttcccttggagtctcctaagttccccagggcagtcggctaatgtcctagggagcttacctgtcttctccataccaagtctcatgtgaaggacgaggctttgcccttgcccagatgaggctctgggggctgagccctggctggctaccagctgcaagagccatggcccttggacagctggtaaatccttgttcccagtcagccctgcccaagatgcctcaacccagccccggcacaggcttcccagggtcacatggagtcaggatcctgggacaggggactggacaggggtttccagggctgagtttctgaacaggggcttcccaggggtcccctcactccaggatctgacatggtcctacaaggaacgtccatggggaggggacccaggagggggaactgacactgacctccccttactgagcctccccccaaccccatcagactgtccttcctctgtagcaagtgcctgcagggtctggatgcaggaaagaaattctgatctgtggaagtttgtctcccctgtgtgtgtcttgcactaaatgtccaaacccccaaatgggatgtaatgtagagggggacacaggcacagcccaggcctgaaaatcctgtgtgtgtgaagcagaactgacccccaacacccagagctcatgagacatcactgtgtacgtgaaactggccagttacttcttcattcacaagatctgtttttatgacttgtagggtgtaggatcctgtgtcattgttggtgacattctgtatcagcagacatgtattggggtatattgtctctcagcctctgtggcaggtcctggggtaattacttgagttcctagtacatatcctgtaattcccctttgtaccagttgtagccaagcctaaggcagattgtgggtgagtggaagaatctccttgccttctgcagcttcaacagtgacttgggcagtggtaggcaagttccagaaagttaaaagtgaggctaggagtggggagagagcatcagttaatactgggccctatgcattgaggtggaaagatggggccctaggtcctggacaggtctcttcatccctcagccttggagtgtgtgtgtgtgtgtgtgtgtgtgtgtgtgtgtgtgtgtgcgcgcgcgcgcgtgcgtgcgtgtcctactgggccaaggtcagcagcatgacctcccttccttcagtgcctctgaccttggcatttccctgtttggagtccttttccccaggggtctgcctggctccctccctactgccttcaggtcctgctcacattagggcatccttgggagaccccttccctgacacctctagagaccctgggtcttccctttctgacctttcgctgctgtgttccctccagggctcttgtcaatacttgacctcacattctagatacccttgcatgtctgtcttcctccctatgagagcatgagctctgtgagaacagggacttgtgtgatcttggttgcaccccagtgcctgggacaggctgcggactcctgtggatgagctcatgagtgttcccagggcccttcacaacgtgggatttattttccaatggctgaggttgttggctaagagctctgttggagttcaatcaggctggtgggaaaaatattagagatagttatagagatagacacaaatcttcttggaagaccaaaaagtttgcataactttggtaatagatctgactgaaggtggtccctttacctttagttaaacaaattaaagtagtaacaaaggaaggcagagtagtttgtctagccagcttgtttactcatgtgatcttaagactaaccattgatgtgccacaggtgcttaattgctttctacttgggaagtccacaatgtcaattaccctctaacggtgttgactcaagcctttgttaattaatcttactgaataaatatgagtctcactagctgatcaaggccatggtcacaactgtttataggactcagcagggagtctgtaagcggccctgacagactcagctggactggcaaagcaaaatatgtgtgtgtcagtgtacactattcacccgtcccccacagctggtgcccctatatgaggagtgctgccacagagctctgtttagtgtcccttgttttttttcttgagtattaccccaacttaaattgtgattattgtcatctgttttcaacattaactgctcagtgatgattcacttggaaaacattaacaatcgagattgtttcttcactaacaacctcagattatttagattttcctgttgtaatcccttcttcctgtttagtgtccaacagaagccctctgtccctctcaggtccccgttctctccaagaaaccccagccagtctctgtgctccctcctcccatccactcccagggagccctcccctcacctgtgagcagaagcgcctgccagggatgtgcactctgtgaggaggggctgagggaggccccatgggctctgctgtctgctttgtcctcctctgtggagaggagcttgggcttcagaaaataaggaggccagaaagtaaggaacaggctgagaaataatggggatgtgtcgaaaggtcacagatgccaacatctttgtcctatgcaatattatccataaaattacaggtttgagatatgcttaaattttcttctaacatgcattaaaataaacatataacttttaatagttatattaaattgtatttaatataaattaaatgctcttgtcagagctactgtgactgtcagctctgctgtccttcctctctctgtgctaagcctcctcccagggcagaagcacttcccagggccaggggtgggggcggggaaaggtaagtggcaatgaggatctgcacaggtagcctttccgcctcctcccctctcagtcctgcctccttgtcttcttttcctctttttctccaatctacatttcagttccttagaccacgctgtgagaagcaaggcttattgggacccccatcccttaacaggatgacctgtgctccccataagtgacctctgctgtgtctagggattggctctgtcagcacctcacagagagtccctggggcccccaaactcagtgttattttctctatgacacagaaacccctctgggtatgcaaggttttcctcatgttttctaatgtctgggaaggttggatttactcccagcagggaggtcacagagatgtccagggagtggggtcctagaaatggacaaatctagagctaaagcccaggtctacgattttcagttgtttttttctgcagtgctatgtgaccctaatttcctaggagtaactaaaatgcaaacctcagacatttgtagacattttatgatttttctctacagcttgtaccactgttattattatttgctttatgctttttcctaaataaatttactttacaaaacatccttgtcctagtagggtgcaggggctcacgtctgtgatctcagctgcttgagaggttgaggtgggtggattgcttgaggacgggaatttgagacaaaacatctttgtcctatgcaatattatccataaaattacaggtttgagatatgcttaaattttcttctaacatgtattaaaataaacatataacttttaatcatcatattaaattgtatttaatataaatttatatacaatacatttttatataataaattatatatataaatgtatatataatagtttttcttttttgagatggagtctggctctgtctcccaggctggagtgcagtggcacgatctcagctcactgcagcctccgccttctgggttcaaacgattctcctacctcagcctcccgagtagctgggattacaggcgcctgccgccacgcccagctaatttttgtacttttttagtagagatggggtttcgccatgttggccaggctggtctcaaacacctgacttcaggtgatatgccgcctcggcctcccaaagtgctgggattacaggcatgagccaccatgcctggcctatatattttatataattatataaagttttctataataaattttatataataatatataaaatggatatttatttaagataaagttattagttttatatatttacatatatttaggaataaatgtgttactgtgggagcccagtgcccaggcaggtagtcagtacatgatggttgtcattagggttaatactttggaattctggattttttcccaagagagtgtctacgctggaatattgggcttgtggctttctgctgatgtgcatgtgtgaagaagctacttccacttattaggacttgtgtatctgtctcgcagtttcactacctattttctcgtgatgttggtcaagtcgcctaacttttctgtgcctcatttacctaatttgtagaatatgggtaacagtacacaagtgtgagtgtgtatttcccaggactgaccactagagggcgtgaaggcaccggcacttactattacagcaatgggtgtagtagtgctcatggtcgtaaacatcattctcccatgaaaggaaccagggcttcctgggagaaataactgattccagggctggggccggaaagcacaagcggagcctggagcatctcgtgaggccagaaagtaaggagccggctgaaaaataatggagatctgtcgaaaggtcacagatgccaaccagaaggagctttgaatgaccaattttgagacaaaatgagcactataagaaataatgatagtaataaattccaacccataaatacccatgagttcctactaatataaataaataattgaatacataaatatataaggatgaagaaacagctttttcttacagcagaattccaattaatgaatgtagaaggaatgatcaaatagaaaatcactatttggctaacagcacagtcaattgtttgtaggcaagaattatcaatggactttaaatatgaatgggtaaaagtatgatgatgctacaactagtgagtaccaagggggaaaaaaaagtacgttgagaagaaacaggctacttccatattcccaaagtatcacttcaggagctacttattgattataatgggacaaatagtaacttacagtagagaaacctggcaacagagtctctccgaggtacaaaggctctcttcaggaaggaggtaaggggaaggaagaagaaaacactgtcctgcctcaattatttgctttccccattctcaagtgtacttcatagacattcaaagatatgtgttgatagtgtccacgatccacatggctctattatagtcatttattcacacatacattcagtgaggctttgagtgcctaatgtgtgcctgatatttgctagatggtggatgctgagaagatcaggtgtgctgctgtctctagggtgactgaatccacctgccccactttacagatgtggaaattaaagtgaaaaggatttataggattagttcactgtcacaaggtcactagccttaaagttacaggagtaaagcaagtttcctgacttgctagattttctgctgcaggtgctgacaatggtgagctccaataggagagaggacactcagagtgaagtgggagccctgaacaccctggattagccaagaggacatgccgggtccagctgtgaccgcacaaaggaccattggggatatttgtattctctttttcacttagagcttgaaatgaggaaaactaagtgcagaaaaccaagagtggaagatttttcacaaagcactggtaacatgcatcagaaaaccctgtgctgatgtctgtcacggtgtttctcactgaacggtaatagtctggctttgagtgtgttccctctacagcctggagttctgcgaggcagggaccaggtgtgattcatctttgtctctccagtgacagtacacagcaggctctgataaatatttcttacaaaataaaatggaataaaaagtagacatctgcacaggtgtgggatgactgagcagcagcagaagcaggaaaagtcagcgtccccagatcagctgatgtggtgttcggattctagataggggtgaggtgccaggatggggatgggggtcctgtggctctgctgccctgggggacacccctaggtttcacagtgcctgctgtggttgctgcactttgcttccccatgggaaagtgatcagagggtgtggggcttcaggtgaccccatgtgggaaatggccaagggaaggtggggtgggcggcacatggttttttttaaccaatatttgaaggtaggttgtatgaaaaggtgttaggcttatttcagcttatggggagtaggacagggattggtgagtgtgtatcaggtatattttggctcaggatggaaaagaactgtcacagtaacataaggtcttttgggaaattacatgtttactggcagagttcaggccagggctgggtgtctgaaaatacctgtcagggtcacttttatggttacaagggcagagcttggcttggaaccaggtttcttactaataccacatattaagtattataaaaactgtcctttgcaataggacattgctctatgatgcaggttgaggtccctctgtttaagtaattgtgggtggctgtgattctctcatctagtctgcgacttggacttcacctccatctgcagtccctctcctttgctgttgacactggtcagagttaagcgcatttactgacgatggtcacagggtggcagcactgcctctctggtattttctaaaacctcttcctggaactgagccagtctaagaggatgtcatgactaagaaaagggcactaatgaggtgaacagataattttttttttcttgtttctcctgtgaagtaacagagtggaggtgagcatggaataattgccttttagaaatggaagacaatggagagaagtgtttcgcaaaccttaatgtgttcacagatcccacacagatctttttattcaatacagattctgatttttctggtgaggcctgagattgtgcatgtctaaggagcttttggatgatgccattgctgctggttggcggaccacactttgagtagcaaggctcgaagatcatttagaggttaattctcactgcatctaatttatggatgaaaacaaaccaaggtccagagagagcatatacagcttgcctaacaaagccattccctaagtgcctgacttcttgcatttaaacccagggcttcagcctttgtccagttctcactccacacatcacacggtttgttcactgttgtgaacgacagttgtggcagcatctctttagtttaggaatccagagccccaatttcactaccctctttggtcttggctcatgctgtgacttcgaatagttttgcccttacttaaaatcttcagtggctcttttgtaatcacaagatcaagttcgaatatctctgtctagtgttcatggctttataacatatggtatctctttagtaaccttacctaacttccctgttttaaaattgtctcttgctgccatagccctccttgctccttcctgctccctaacaaactgtgttcacttctctctcagtggtagtgatgatggcatggcctctgatgttagactcatgtaacttctaatcccagatccaccaccaacattggcaagttgattcatctttctgaggataagcatcctcctctgaaataaacttagatggcggttgagaggggtaaataaaataacacacaaacccactctcatccctgagaccctcttcaaaactagcatataaaaatagctatttgaagaggttcagtgaaattcaaggtaacacagagaaggaattcagaatcctatcagataaatttaatagactgaaataatttttaaaaatcaggcagaaattctgtagctgaaaaattcaattgacaaaccgaagaatgcactaaatctttcaacagcagaattgatcaagcagaagaaagaatttgtgagcttgaagagataatatatgaaaactcagagtcagagagacaaaagaaaaaagaattaaaagaataatgcatgcctacaaggtttgattattaagctactcaaagagatacaagagaagggtgaaaaccaacataaagaaatgtaaaaaacaatcagaatataaatgaaaaattttctaaaatgctagctagtttttttttgagacaggctcttactctcatcacccatgctggagtgaagtggcacagtcatggctcactgcaggctcaacttcctgggctcagatgattctcccacattagccttccaagtagctaggactaaaggcgtgtgccaccaggccaggctaattttttgtatttttagtagagatggggttttgccatcttacccagggctggtcttgaactcctgggctcaagtgatccaggagattcactgccaaaaaggatataaccaagtcatatagtcataggttatctaaagtcaatgtgaaggcaagaattctaagagcagtgagacaaaagcatcaattaacttataaaggaaaacctatcagtctaacaccagatttctcatcagaaaccttacaaaccagaaggtattggggtcctaatcttttggcttcttaaacagaatagctctcagccaagaatcttgtgtagagtgaaattatatttcaaaatgaaagagagaaatacagtctttttcaggcaagcaaatgcttcaggatttgtcacggctagaccatcctacatggaatgttaaagggacttctaaatcacaaaacaaaagatttaaatagaacagaatagaacctcttgaaaccaaaaaattcaaatggcctataaaacaataacacaataagaaaacaaagtagataacgatcaacatgatgactggaacaaatattaacattgaatgtaaatgacctaacactccacttaaaagacacagattggcaagataaataaaaaatcacaaaccaaatatcagctgtcttcaagagactcacttaacatgtaaggattcttatagactcaaggtaaagagatgataaaagatattccatgcaaatggaaaccataagtgagaaggaatagctatccttatatcatataaaacagactttaagcaacaacagtaagaaaaagacaaataaggcaactatataatgataaaaggatcaatcaaacaagaagatattacaatcctaaatatatatgcacctaactttggagctcccacattcataaaacggttatgatgagacctaagaaaaaagatcaacacaaaacagtgagggtgtcctgggttttctttttattggacagcagtgtactagcctatcactttcccagtcaggggatttttggtctccccattcccctaccatgggttcatgccaaagtccatattttttattagtgtttggaattggattttttttttttgaggtggagtctcgctctgttgcctaggctggagtgtagtggcacgatctcggctcactaacctctgcctcctgggttcaagcaattcttctgcctcagcctcctgagtacctgggactacaggtgcatgccaccacacccagctaatttttgtatttttagtagaaacgagatttcaccatattgtccaggcttgtatagaactcctgacctcatgtgacagggaaacaggcactcagtgaacttcatgcgattgaggagttaatgataatgagagaagggctgtgaggggacagcactggggacaccagagcctgtgacgggctgagttgctgtgccttgggagatgcccttttgactgagccctgggaaggagggggtgtgggggcaggagctgcctgcagagggagtggcctcaggtgggcggccacctggctgcagggaagaggtgacagagttcgtgtgcagagcttggagggtgaggaggaggtgggttgaggtgaccttggtgagggtgaaccatggggggctgtgggccctgctgagggaggccagccagccctggacctacagggtggtttggtcttttttgtcccattcccagcatccactgagtggtgaaactctgcaggccagggaccatcccactggccagaaggagcgcacagtaggtgcccactcagtgcatgttgggctggacagaacctcactctgccccctgcccccagctttgggagctgcagcaaggtccctccccctagggatctccatgcctctgtctctgaggggtgagatggggagacttcaaagggccatctcagagtgtgggggatagagacgcagaagtgtgggggatagagggaggcctgggctctagacccaaaggaccttacacacctcctgagtcttttcaaatggtttcttctgttactttaaaaatgatgtaagtcatcatatttattgtaaatcccaggaatctaatcatgcgtaaaataaggtgtcttatccttgaccccaccccttccccaattaaatttccaggatgttaccactgtttgcagttggtgtgaatctctctttaataatactctgtttatctcacttgtcgttttacgccaaaatacccattgaattatattattgctgaagaccattcttttttttttttttttttttgagatggattcttgctctgttgcccaggctggagtgcaatggtgtgatctcggctcactgcaacctctgcctcctgggttcaagtgattctcctgcctcagcctcctgagtttctgggattacaggtgcacaccaccacacctggctaatttttgtatttttagtaaagacagggtttcaccatgttggtcaggctggtctcgaactcctgacctcatgatccaccctccttggcctcccaaaatgctgggattacaggcatgagccaccacacctgcccagaccattctgttctactgaatcatgtgtggtgggcacctcttatatcaatacatatggattttatcttgtgtttgttattggctcccctttttctcattgcatggctacactcaatgctttgtccacacccctgttcctgggttggaatcttgtgacagaaaatgaagtaacaaaggctaaagctttctaaagtggagtcaggagattgcaagacaattgcactttcaccagcaagagctcaaaccacagaatgttccaatagatttggataaacagctgaagtcagtattcaccagccttcaacatctcaactaggagaaccctaaaattaactaagcacatagaatggaatggacttgtgatttaggattccttctcagccaatgagctgcttctgaaaacaactttttgtggaaattacctgtaaagaaaaccctctcctgtgcttgtcttacagaacactagtcagggctgccctgattcagtggacccgaattgctattatttgtttcctaaacatatggtattttctgtgaccttcatctcaatcttttttttaagttactgggctgtttcccagttttcataatgacgagacattctgcagtgtttcatacacatgtcttttccccatgtggagtattgatccaggagctcattcagtcaacgcatgtttatgaagcatcctgtgccaggctgtgggctggtcactgtcttcagcagagagaggacaggcacagtcttgccttcacagagctcacagctcagggaggctcttagaagtgggatactggtcggagcatgtgcacattaaacatgatgaggtcaaggttgctatagggactaaaccacagtcccaccaagatcgcattgagttcctgtggtagaccagaggtcagggcccctaagatgtcctgagcagctccctctgctcagaagttttggttccacaggtgacacacctgagcacaggtgacccctgcagaacctgtgattaccacccaaagccaagagtgagtggtgggtgttctaggaggaaccgtcacctccatgggcagggttggggaagactgaggggagcaggtggctgatgactttggccagaaggtagggggatgggcaggtgtgcgctcatagggaagggaagagaagggagggcattgcaggcaacaacacaaaggttggaacctgccttcatggactgagaaaagcagggagtccacccaggctgcagctggggagggaagacatggggagcagtgggtctaggggagaagcagactgcgattgaccttggggactgggcagtgagcagaggtgtgttatgtgtgtctgtccccatcatagatatgaggaggggtgaggccgcgggtggcacctgggtcggtgggatttcatagtgcctgctgttccctagagcctctctgtatagagggtcagaatagatctgaggctgtggtctgggggaaggggctggtggtgcttaccatctctaggggtgggaggagagggatgaggatgcccctgagcagtgaagcctcaaggtgtgtggagccacagttgtctctcattagacatgtgttttgcgtgaggatgccagggcctggtggttattactgttgtcaagtttgcatgacaaggacccaggtatccagggatccagagcacagggcccctggtgaggggatgaggctcagatggggctgaccaggttcatgtggtcagagtgggagggactgatggagagacagagcctcaacccctcctgtcaggagctgtggctatgtccaggagagatgacaaggatgacccaggacattgagtgagtcattgagacattgaaggtgaggacagggcagagaggaccctggtgactgctgaaatgtaggatgtgaggagggctctgacccatgcaagttacaggacctccccacccccgagcccacagatgacccttaaattgggcatcctgagtgctgtgtgtgcccagcagggacactggataggctggacctgagtctctgtaagggcagcgctggtctgtaggaccagagtcttctctgtgggtgtgacgtgggcaggaattagcaagatgggggtgacaaggcttggcttggaggatctggtacagaagcccatgggcttggtcagctcagcttctcaggggctcagctggggctggaggagcaggatgctgtgctcagggcatgctccaggcagcgtgatgtgtgtggttccagggtcaggcacgggggtcaaaaattaaccatgaaaagttcccaccttctgtaggcagagaaaatggcctgattgtcagggtcagggagacttaccatgtggccaaagcaggctctcagcctcccagagaccacaccctgggtgcagcactcagctctgcagggtatggcaatagatgtgccaagaaccccaacatccagatgcatgcaaaaattttgcgatatataaaatagagcagatcaagtttccctgcaataacgttgttcctggttgtgtctttttcttgtaaactagacatggacatctttccagcagtctgttctcatctgccaccttcctgctgcagcacctcagaatgaacattcctgagacactgtccgtggtgctgacgaccaagagctatggaacagagtgtgatgtagaatcttctagttacctctgctctcctttcacttttaacaacagagcatcattaacaatgagaaggtggagaggtgttcaggatcttgaagtgacttctgtcttgctctcccataaccctgaagctgctgtagacattattgcagaaactgacaccacagtcaggatggccttgtccaggagcccatgtgcagtttgtagtgagcaaggatgagaaaatggtcttgaaaggggtgatggacagaacaggggcttttcaaaaatgtcacatcatcacccccagcatccgtgaatctgtcacatggtaagagaccttacagattaaatgaaggattatgagtttggaagattattgtagtttatccagatgggtccaacataatcacagaatcccttccttacaaatgagagagggaggtgggagagtcagagaaggaggaggagatgtggggatagatgcagaagacagagcggtgtcaagatgctgcactgctggctttgaagatggagaaagaggacacagccaaggatgcaggaggcctctaggaggtggaaaaggagaggaaacgcactctgccctggagcctccagaaagaacgcagccatgtgggcaccttggttcaagtttctgtgtcacttagcttgtgggaatttgtcacagcctcaacaggaacctacagaggagtcaccttgtgtgcaggtgggatccagggtcatttacagctaaatcctgatgtaaatattgcaggttgcttttcctacttcctatctcatggccaacaaccctggacaatggcagaacacccttggaaaccacggctctgtgctttagtggagggaccagcttgtttgtgggaaggtagcacctggtccaagtgaacctacatgagatcgttactctccccagggccctcagggaagggctgagaacagctggcccaggtgtgtggaggagctgcaggtgaggcagggctggaggggcctgtgggtccaggtagaggggcagacaggttgtcccatcgccatgggagcctgcacgagctttaggttggggaaccctgctcctctgacctggacgctcctgtgtggagaggaggcttgctcagtgagatccacgccagggggtaaattgggaactgatgggaaatgaggggctagagtcctgggtagtgcctgggaggaccttgctcaaggactgaattcttggtctgttcccaccttggttactctgacaacccctctctgtgtcccacggggataaagatctcctgagcagtggccattgggacagaggagaacctggtggccagagctaagcatccaggatcctggatttggggacaggcaagctcattgctgggggacagtgatagatacggcctccagggcctgggtgaagagagcaggagggctcaggacactggaggctgtgtggaggtcacacccacgatctgtaccacccatggatgctcctgcattgctcacctttgtgtggacatcagatggccccaacttttgcactcctgagacatctcatgcattcacagagggacccaggctggggctgtgcatggccttggtctctagggtagtgtgaggacagctgagcactcagctggctgggcaggactcctgcgaatcctgccctttcctgtgtagggtccaccccagcctgactcctaaccccctactcctgtctttccagggaagagagactggggttgagataaggtggagatatttttcctgtgtgacccaggagagaatggacatggagtttcaggtgagtttctgctaagttcccatgagcagaaaaagagccaatgagaggaagtttcccctttattcagatcctttccaggtgaccccgggtgggccataggcccattcactttccctgcaagcccccgcttcctgtggtgatgggaagccttcgccttggcccacccagagcccggggcagtctgttgaggtctctatatattcagcagggacccccatcccttcctgtccccaggcctgtgtctcctcaggactcagagctggttctctggctcaggctccatgtccttccccatccccagggctgggggcttcagggacgctccatcaacccacaggagcagctcccagaggaacctaagaagccacatctgctttgtggtcgatccagcagtaaatgtttgtgtcagagtgtagcaattccagtaaaaacagagaagaggtcttgacccctgaggccttctcagaacagggtctggcatctctctctgggcccacccagggctactctgggactgaacctggctgtgctcagggggttcctgctcccaggcccctccctcctctgctcaccacctcctgttattttcactgcagtttcctgaacttcagctcagccagatgccagtggggacagatcctgggtctccctggggcccaagggaccagaatatctgtggcccccactcacctcatagatgagagcagctgccctggtgctgggtaggggaatctgggcaggggagagaggggtgtcaggggacagggaaggattcctgctgtgtaggaattccagggctctcctcaggtgatggagggtcccagggtggggttagcacagggagtggatgatcctggccctgaacagaggcccagctcatggccagggcaggtctaaccttatccaagtcattctgggtagggtgggtttgtgctggggattgacagtccccctgccctgagcctgcacagctggggccccagtggaaatgggattgggaacggacagtcttacctaggagatggagctgtcagagggtccatggcctggggacagagacaaaagtgagcacgagagtgttaggatagctgggcccctcctgcaagagtgtgtgggggtcctcagttcttagagaattggggagagggagcctttctcaggttattttaggggtcaagtaagcaagtgaggttgaggaagtgacccatgacccagagcccggaggttagggctgacccggccagttggggtttcctgtgtgatgttttatgggatcctctttgcagccccagggatagggtcagaggcccctgggtgtaactggcaggagtggacaacttggggctggcttagtagttcccagccacacccagactgaagggacactcaccgggggtggaggctgggggctgctgctccctgaagtcactctgatcgctggccctaggaaaggtcagggttatttgtgaaggtgcaaggttaaaagtcacaaattggagttaaaataggggaccaggaaaggagcctatttccaagaggggtatggagacctcctttctttatggagttctgtggtaggaggggcccaggtgaggggagttgaggaaaggccttacaaagccacatctgtcctggccagaggggaaggactctcaggcagatgctgggccaggagaacattgatccagtgacacaggaaagggactgaggacccagggaaggaatcagaccaccaggggttgcctgagaggaagggtcaaggcaccagggggaaagcagggccaggcacatgtgcaggacactgaggggactgcatgcatcttggattctcctggaactcagtgtccctgctgtgaccagacactccactcagggctggagatgctgaaatgggacaatgatcttgtcttctgtctctgccctttggcaagagacataaacgacattccaggatatgccatattggggccccggttctcccttctcacagctcagtgtctgcagttaccatgtcagtcaaaggggtgctgaccccacccagcccgtccaggctgttccagtctccactatgtgataatgcccaggatcccccctcagatgccctctcactgggtggatggattcagtgaacagggggaggtaccaggtattgagcaccgctcccccctgctccaggcagctgtggctttgctgtgctaggaaactaggaccatgctcaggggcatggccttaattggactgaattcactgaggacaaagctgttgaggaagcagcccagggtcagcagctggtgaggaaggtgccatggaatgagagggaaggatccctggggagtcgggaggctggggagagcctggcactgaatacaagacagggtctccttccttctcgcctggggtcagcgtgaaggatgggagcagaatggggaaaagctgtggtacctgccagtttttcggaggagcaggaaacacacaagtgcagccaccagaagactcccaaccaggaccccgatcaggatgcctagagtgttgtcatctgctgaaagaagaaggcaaaggggatgaggtccaaatctgttccagggggaaccatgaggggccttgcagggcaggggcatggtcagggaggaaggaaatgccatggagcctgagtgtggtctgttgtgctgtcctcatagctggctcccttgctctccgtggttgcaccattttctgtgtcttaggcttgaattactgggatgcatcaactcctacattctcccacaggaagcctgcacctcatcctgctcctgtgttttttagtccctccttcctctcacatcactcctcttccccctgtttctttttttccatcccatggcagtcgtaaagggcaggcccttgctgccaactcaatgctgatgagcagggatgatgttcattgactgttttcaggggccttccacatggaaggcacagtgggaatcaatctacctgcagcttttctcaccctcccattgccttgagggagaagggtatgtgatattgtgaaatacgtatttggtgttcatcaccattgatatggttaggctctgtatccccacccaaatctcaccttgaattgtaataatccccatgtgttatgggagggaccttgtgggaggtaattgaatcatgagggtgggttttttccatcctgttcttgtgatagtgaataagtctcaggagatcagatggtttcataaagggaagcttccctacacatgtcctcttgcctgctgccatgtaagacatgcctttcaccttccatcatgattgtgagacctctccagccatgtggaattgtgaatcaattaaacctctttcttcatacattaccaagtctcaggtatgtcttcattagcagtgtgagaatggactaatacagtaaattggtaccagctagtggagtgctgctataaagatacctgaaaatgtggaagtgactttggaactgggtaacaggcagaggttggaacagtttggagggctcagaagaagacacaggaaaaaagtttgaaacttcctagagacttgttgaatggttttgattaaaacgctgatagtgatatggacaataaagtccaagctgaggtggtctcagacagagatgaggaacttcttgggaactggaacaaaggtgactcttgttatactctagaaaagagattggtggtattttgcccctgccctagagatctgcagaactttgaacttgagggaaatgatttagggcaactggtggaaaaaaaattctaagcagcaaagtgttcaagatgtgacttgggtactgttaaaaacactcagttttatgtatttacaaaggtatggtttggaattggaacttatgtttaaaagggaagcagagcataaaagtttggaaaatttgcagcctgatgatgcaatagaaaagaaaaatccattttctgaggagaaattcaagccagctgcagaaatgtgcataaacaatgaagagcaaaatgttaatccccaagacaatggcaaaaatgtctccagggcatgtcagagaccttcctggaagccccttccatcacaggactggaggcctaggaggaaaaaatgtttcctgggccaggcccagggctcccctgctgtgtgcggcctagagacttggtgccctgcatcccagccactccagccatggctaaagagggccaaggtacagctggggccatggcttcagagggtgcaagccccaaaccttggcagcttccatgtggtgttgagcctgcaggtgcacagaagtcaaggattgaggtttgggaaccttcgcctagatttcagaggatgtatgaaaatgcttggatgtccaggtgaaagtttgctgcagaagcagagccctcatggagaacctctgctagggaagtgttgaagggaaatgtggggttggaaccccgacacagagtccctactggggcactgcctaatggagctgtgagaagaagaccacaatcctccagaccccagaatggtagatccactaacagcttgcaccatgcacctagaaaagctgcagacactcaacgccagcctatgaaagcagccaggagtggggctgtaccctgcaaagccacaggggtggagcccaaggctatgggagttcagctcttgcatcagtgtgacctggatgtgagacatggatacaaaggagatcatttcagagcattaagatttggctgccctgctggattttgggcttgcatggggcctgtagcccctttgttttggccagtttctcccatttggaatgggtgtatttacccagtgcctgtacacccattatatctaggaagtaactaagcttgcttttgattttacaggcttataggtggaagggacttgccttgtctcagatgaaactttggacttggacttttgggttaatgctggaatgagttaagactttggggaactgttggaaggcatgattagttttgaaatgtgaggacatgagatttgggaggggtcgggtggaatgacatggtttggctcttcttcacccaaatatcaccttgaattttaataatccccacgtgttgggggaaggacccagtgggaggtaactgaatcatgggggtggattcttcccatgctgttctcatgatagtgaataagtctcacaagatctgatggttttagaaaggggagttcctctacacatgccctcttgcctgccgccatgtaagacatgccttttgccttctgccatgatttcaaggcctccccagctatgtggaactgtaagtcaattaaacctcatttttaaaaaaattacccagtctcaggtatgtctttatcagcagccaagaccagctcggtcgcggagatcctaacccagcagtgctagaggaattaaagacacacatagaaatatagaggtgtgaagtgggaaatcagggttctcacaggcttcagagctgagagccccaaacagagatttacccacatatttaataacagcaaaccagtcattagcattgtttctatagatattaaattaactaaaagtatcccttatgggaaaccaagggatgggccgaattaaaggaataggttgggctagttaactgcaacaggaacacgcccttaagatgcagattgctcatgctattgtttgtggcttaagaacgcctttaagcggttttccaccctgggtgggacaggtattccttgccctcattcctgtaaacccataaccttccagcttgggcattagggccattatgaacatgttacagtgctgcagagattttgtttatgaccagttttggggccagtttatggccagattttggggggcttgctcccaacagactaatacacccattttctggtatgtgactctaaagtccttagaatcttcaaagtgatgtctttttcaagctaataattgactgatgactggcagcccctaggcaacttcagaatgaggctggtcactgacccaggtaggattagagggttgggactttcagcctcacccctaatccctggggagggacctggagtttgaattaatcaccaatgaccaatgaatcaattaatggccaatgattgaatcaattaatggccaatgattaaatcaatcatatctatgtcatgaaccccaaaaggactgggtttgaagagctgaacccatggaagtttctggagtgtggtgcatctggggagggcatggaagctccacaccccttcccacatgccatgctctgtgcatctcttcatctgcatcctttgtaaagtcctttattacaaaccggtaagcctaagtatgtgtttccctgagtcctgagagctgtttgagcaaactaatccaacccaaacagggagtcatggaaacctcaatgtgaagccagtcataagaagctctggaggcccagacttgtgactggtgggaaggtggtggcaattttgtgggactgagccctctgctgatatgtccaggtagatagtgtcaggatggaattggaggacacctagctgatgtacggtgcagaactgattggctgctgggtgtgtgggagaaacccccccgcatcacatttggtcacagaagtgtgtctgtgttgatgattgttattgtggagtgagagcagaggaaaaacacagtttgagtttttccaaacagggtggaatcccatctgccaatttagaatctgaaacttatagtttcagtacttcaattaagattgaagtacttcaattcagtacttcaattaagattcagtacttcaattaagattcagtacttcaattaagattacagaactggtaagtgaaagtgatacaacaaaaatgtaaccaaagtctgctcaacttaacagctaataacaacaaagttcataaaaataataccagtcgatattgatagcactgattgagccctggctctgtgcatgaccttgttaagggctttaatcgcattaatctctgaataaatatcctcacaaccaccctgagatccaggtgtttgtaacaattctacagatgaggaaactgaggcccaggaggttgagtgtcttgcccaaggtcaaatacctggtacctattgtaaccaggatgataactggatgagtctaatccctgagttcttacccacattgctccccaggctctgaaggaatctcatccttctcattccgtgtatcattttacaccccccctccctcctaggaaaatatacaaggaaaggagtgagaggggccgagggtcactcacattttacagtcagcttgagggggtcgctcctgttggagctgactgggttggagacctcacactgatactccccagcgtcctcctgcctgatggggtctatggtgagcatatggttaaaccaggacagcttcatcctcttcgtgacctgcagacgctggttgttgaaaatccactggaaagaggttccagtgttatttgtgtggcaggtcaggaccacggagcccttctctgtgactgtggtgctgctggcttggatggagggctgagccactgactctgtggatagagtgaccaacagaaagtgtcttggggccatgctgcatcctcagagatctcagagtcaaatttagaacattctcctgtgaataaaggagaaagatgaaggacagggaggagcagagagaaccagagacacccatagcagcgagcagtagggactacagtgacctcagagaccccagggaccaggaggacccagctgcctcagaccaggaccagggagccctgaaaaccctcccacagatgagcggccccagagtcacatgagatgcaatacctggggtggctttaggagcaggcagtcagagaaatggaacatgggtctcagcccctaagggacaaggaagaggtgtggccagctcctcctaggatcctacatccaggacccagtctgtaaagaggttatgattattcctttcttttttcattaattccctccctccttcatcagagaactactgagtgtgtgtctcagttgggccttgtgcaggtacagggtgtagtgggaagagaaagctgagtcctttccttcatcctcccatgggagtgacatcaacaaatcaagaaattcatgatttcacgtccagtgagggaagaaatgtggatctgatgggagaggcttggacaatcctggcattgagtctgatagttgagacaggtgatttcgttctaagtaaaaactgactaattctccatttgcccgtcattcctcagaccagaatctccctctctgagctgaggatgcccaagaagaaaggagctgaaccaacatctggtcctggggtccacagatgccccacggtggtggccacgaccagattctgggctgcagacacacggtggtgtgacgttgagcactgacagcctgtgtgatgctgatgcaatttctctttaataaaatggggtaaatgtcaatggtccctggcttgccatcctctctgtaaattaacattaaaatatttacaattacctgacctaaagcttggcacagaatagctccaaataaacatcatctattattattttactccaaaaaaaaaaaaaaaagagttctctgggcctgattcctggtggagaaggagcggtccagagtgtcttttctctgctttccctcctcctgaggacagtgcacttcccgggacatcttttaagtttcccatccagtttaatggcctgggaagtttgtttgtctgtcctctccactctgactctcaggtgaaagatgaggctctgcccttgcccagatggggctctgggggctgagccctgcctggtgaccagctctaggaaccacggccctgggacagctggtaaatcgttgctcacaatcagccctgcccaggaagccacaacccagccctggcacaggctccccagggtcatctggagtcaggatcttgggacaggggcctggggcaggggcttgaagggctgagcttctctcagaggatcctcaggccaggccctgactgagtcctataagatctttctcaggtcatgtctatgaggaggaggccaagcggggttggactgagactgattttcccccgctgcatctcccgcatcagactatccttcttgctgtagggaatttccacggagtccggataagggaaaggaattctgatctgttatagtttgtctcccctgggtgtgtcctgcactaaatgcccaaaccccaacatgggacgtaatgcagagggggatgcaggcacagcccaggcctgacaatcctgcgtatgtgaagcagaactgacccccaacacccagaggcacggaggaatcactcaccgtatacacggagatggtgagatgcctgttcaatctgagaatttctgtatgtgacttgtagggtgtagtatcccgtgtcctctagggtgacgttctggaaatgcagatctccactgggtgatattgtctctcgaccgctgtatgcaggccctggagtcctaacgtgagtgtctattacatatgctgcgattagctggttgggctccaccgttttccctttgtaccagccatagctgtaaagattctcgggcagataaaccacagagagatgaacattctccccttcagcaacttcaaagggcgctgatgcaataaagagccaggcagtggtgggtgcgttccagaaagttaaaagtgaggctaggaaagggagagaatatcagtcaatatttgacctatgcattggcatggaaagacggggtcctgggtgcaggtctcttcacccctcagccttagagggtgtgtgtgtgtgtgtgtgtcctactgggtcaaagtcagcagcatgaccctcattccttcagtacctctgaccttggcatttccttgtgtgaaccctctttcccaggggtctgcatggttccctccccactgccttcagttcctactcacacaagggaatccctgggagacttctttcgtgaagcctcctctagagaccctgggtcttccctttctgacctttcccagctctgttccctccagggctcttgtcagcacctgacctcacattctagatctctttgggtgtctgtcttcccccccatgagattgtgagctctgtgagggcatggacttgagtgatgttagttgcaccccagtgcctgggacaggctgcagactcctgtggatgagttcatgagcgttcccagggccttccatatcctggggtttatttgctaatgtctgaggttggcagatgaagacagagtttcatgccctggtggtgtttttatttaaattgtcactgtgatatagttttactatcattttcaaaatgtagtggccactgacaatgaacttgaaaacatggaccaactgagattgttttgccccttggcaattccagttcacttagattttttggttctccttagacgctctctcccctgagtctctaacaaaagccctctgtctcctctcagagccccatcctccccaggagaccccagccagtctctgtgctccctcctcccacccactcccagggagtcctcccctcacctgtgagcaagagcccctgccaggggatgcattctctgtggggacaagctgaggggggccccatggtctctgctgcctgctctgtcctcctctgtggagaggagcttgggctccaggaacgctctagacagggttactgtgactgttgtctctgctgtccttccttcctctatgctgagcttcctctcaggcaggagcacttcccgtttatgggcaagggcggggctctgcctacaatgtctctctgtcccctcccctctcagtcctgcctcccttgtccctcctttctccttcctttttgcctatatttggttccctaggcaaaactttgagaagcaacgctgatggggtcctcataacaggacgacccactctccccagtactgacctctgctgtgttctggccttggttctgtcacagccggtagattatttccctttgtgacacacaaaaccagctgggccctgggtctcctcatgctctccagtgctccaggaaggcagaatgatgcccagcaggaaagtgacagaggtggctctgggggctagaaaggggctcactgggtgatggctgggaaggacccacccgctatcttcagtgtcaccagcctggcctctgacccagggacagagacccaggcctggaggtctcgggaggatccccagctcctaggtgtggagggaggtgtcctgtgtgtcctgggaagagaggactttgatggaaggaggtgggaggctctgggttctgctgtccttggtgaaggtttcagggggaccctctccatgtctggggtctgtgcccccagcttaactctcattctctttgcaaatacatatattttgtggatctgcagttgcctgaactgtctcatgtccctaaatctttgtatccctttttacagaaggtcaggaagggtgtgtacatgagtatgaggactatctgatcagggcgagtgtttgtttcccaaagatctctttagatatggtataatacataagataaatgtactgaattagcaattttaagtgtagaattaaatgatactaattctattcacaatgttgtacaaccatcaccataattttttaccagaaaatcttcattataccaaatggaaacttcatacttttaatcaataactccccacttccccctgccccacccactggtagcctctgatactatcaatctctgtgaatttgcctagtttacatgtctcatataataaggaattatatacgtgtattatttttttctggattatttctcttagggtaacacttttaagattcatccacgtcgtagcatatattacagcttctttcctatttatggctgagtaatatcccaatatatgtttatacctcaattttaattcattcatctcttaatggacatgtgggtggtttccacatttttgctattgtgaaaaccgctgcaatgaacttacacttggaagtatctgtttgggtttctgtgttcatttctttgggggtacatataggagtataaatatggggtcatgtggtagttctatgtttaagtttttgagaaacagccaaactgttttccagtttgctgtgctattttatattcccatcagcaatatacgagggttccattttctctacattcttgtaaacacttactatttaatattttttaaaacttatagccattctagtaggtgtgaagtgatagctcattgcagttttgattttcatttccctggtggctgatgaagttgagcattttttcatgtatttactgacaattttaatattttttagagaactatttattcaaatcatttgctgtttaaaaaaaatgggttatctttttattattcagttgtaatagttctttatatattttagatacaagtcccttatggggtacatgatttgcaaaatttttctcatattctgtgtcttctcactttcttcatggtgttctttgaagcacaaacatttttaactttgatgaagttcacttatctatttttaattttgttacttatgctcttgatgtcatattgaagaaaccattgcccaatccaagatcattaagttttactcctatatgttcttctaatggtttgataagttttgctattccatttaggtttttgaaacattttgagttaacttttgtatgggctgtgaggtaggggtctaactacactatctcgcatgtggttatccagttgttccagcacaatatgaagaggctaccattctttccccattgaggaatcttggcacccatgtcaaaaaccaatgggctgtaatggtgagggtttatttctggactcttgattctattccattgatctctatgtgcattcttgtgccagaagcacactgttttaatgattgtagtgttttagtaagttttcaaattaggaagtgagtcctccaatttttttttccagattgttttggccattctggggtgacttttaaaaaagatgtagttcaatggttctcaaagcaggagtggttcagctctccttttttggcagtctggagacctttttaggaccttaatctaagtagataaattattcccactttcttttctgagttgctatgttacagtgtatattgacacccatgaaataattgagagaccctggaagtgcttgcctacatagtgagggacaattagttccatgatcatgggcacagaagattttgttttgggaaacaattttgttggtggagttatattcatgcttactcttttatttgtcttcatagcctgcatctccttcagacttcatatctgtttattttcttgtttgtcctctggggtttgggtgttgggtgaccagtcagctggagctggaggaggtgcttagcaaggcagtgaccctggttgggaggagcagggctcagcagggtgaaagtagctgggccttgagtcaggagtggcatctggaaggcctgactgtaagggtcagaagggccagcaggtgggtgtcctaggcacaaacggtggctgctgctgtggactggaggaaggtaagaggccccgagtattccatgttcttactggctccccaactgaggattcctctcctgggctggtgctgtcctgcagcagggaggggttagacagggacggctgcacatcaggccggagtccatgtcatcctcttaggcactgtcactacagattgaggattctgttcataagccaagcctttgcacaaggaagggacccgggctctcaaggaagagcagctcctggtcagacctccatctccttctctctcattgcctgaggcctcaagcttggtctacctggcacaggggtctggatcctcctcccagggttggggtcttactgagctgggcacctgcaggtgggagaagatctggaggggccccatctgccttcaccagattgatgttgagggtccctgagtcctgcaccactatcaggtgctgagcaacttccagtgtcagtgacaaccaccccatggtggaagcagaaccacctcgtgagaaagcacctccaagcctcagtgcttgccatgtgtgggaatttgctggtttcagttgggggcatgttggtgggtggtcatgaattcagggccggattctatgctcacagtgcacatgctggatgtggtacagaccccaggcagggctcagtggggtggttttgggtgtgcacaggtatcttttctggaggagctggtggtgatttggctcccagaagttcctgagctctgcagactcaccaagcactcaatatttgagtgaacattgggcgagagagcagaaggtaagtgtcagggcatcggggttggtgcctctgggaagaggaggaacattctgggaacaaagctctcccccggcttacagggagcttcccatcgctcctgccttgaggatcagggaaactagggcctctgctcttccaggggctgcttgcaggcagtttgctctgggagggggtgacccaggagttgcctctcattttgcatttgagatttaaaaggagaagggacagtatatcttgccaggtcacaaaaattacaggcatcatattgactgaagggcactcctgtcatcactgcaatataccagaatggtcttttaaaaaaataagtgatttaggtttaccagcaactgtaatgcttgttttattcttctagttcaccgttaatgtcacttttgtagttttagcactggcaatgttgattttatgttgactctgatgattttaagctttcatttgttcacatagagatcatcttctttctgaatattaatgcattttttctctatttctactggttattcctgtacatagagtagagaatcacttttcccaaggaggtggaaagcttctgactaccaaaaaaaaaaaaaagtgtcaaaatgctttaaagtcagtaacttaaagatcaaatccaagagtgggcaacagattctgcccagggtctgaaaggtggagaggtgactggtgaggatgtttaaaagacctctcctctctactccctaaatgggggccatccagtgttcttgaggttcagagaaggcccagggctggggcagcagggcactgtcagctcccagctcccaggggccaggagtaagaccccaacactgtccagacactgattgcattcattttgggggagagtagattcttatttaaagaataatacaaaagtctacaaatatgaacataaacagaaattcctttgctacaattttccccttaataagacattccttcctaatgacatatgtgactgcattcatggctgagatgttttctaggatggtgagagcatcagagtggactatctggtgccttggggtcatgcattttcttcttccaatgtctacaggatcccccatgtcccactttgtagtgtaactcagtgtgtgtcattctggtttttgttgtatagatccttggaaagcccatgtcattcctgctgtgaggtacaggcagccaaatggcatcatctctaaacatgccttctcctggtacatcaaattatggaataaatgaaagccattttgacagatattgaagatataagtttctactcttcccacacatgcttctcccaagtgaaggattttactggtgaattgttattagagattagtgtggatcagtgactctgccaggggaaattttgccctctaggggacatttggcaaagtctggaaacattgttggttgtcagagctgggggagggagtcctgctggcattgagtgggtggatggtgctgaacaccctgcagttcacagagccccaccagtttgaccacccaaatgtcaatgctgaggagtggagagccctgctgtgccctcccgcagcttccctgaagcttcccctcacctgctcctcccatgtctccccaccacttccccacttcacccgcctccttacacctcagtcccctccacctgaactcaccccttagtccaaggccagccctgatctccgctctcctggtctccttgctccttagcaggaggcgcccactagatggcgcccttgcccttactggagctcaccgtctccctttccaccctgagacaaatgtggctgcttttactgccacaaccccagccctccacactctagatttgctcagggagcagctcctggacagacctcagggaccccagggaggagcctcactctggagattttgatggcatggtctttgaacttcactgttacccccagtcaggatccaggatgttgggagtgcatgattctgcccggtcccacttcagcaggaccccactgctgagttgtctgtggggacccgggcctctcatctccttcttgcattgcaggagagggatcttagcactgctttcacataaagtcagataatggaggagtgcaggtgagtttgggaaggtggacatgaagagaggttgtgtccctagaggtggcagcagtgagaggatgggcaggtgggaggaacacagcccatccagggttgccagccatattaggagcgacagcctttcctctaagcctccagcctttttcctgaaacattccagaactttccacttcagcacttcccactgaggctcctcaggtctgtccctgagctcccagctgagcctacctacccatctgaaatcctgagtcctgtgtcaccctcgttccccattattctgtgcagttctgtgggacgcccagctctcctgacacccccagtcttcagaatggccatcagcgctgtcgctgtggcaccagggtgactgccgcctggaggctgagtcctggcttcctgacagctgtggggcccgctctaggctcccttgtcctgatcattcatcacctccaggatgcacagcagctgggccagggggaggagcagggacaggtgtcagccaccctgtgtgtctgcaagtcaggctgggggtgtgggaggacgccaggaatgactgaactttctgatttagagggtgagagcttgcactgatggaatttgggatttaataggaaaagcatagcgttttcctattttgtaggcagggtggctggagtttggaatcatagattcccctgggatgtcactgtggacctcagtcccacccgttaggggcacagatttcagaatccacaccctggggcaaagcaggcatgggaggctccatcagcctggccagggctctctatttgtgcagctgctgcaaggagatgtgcactctgatgggaacagtgctccctcctccttggggggcagtatctagctccctgcagcccctctccctgcaggccctgccctctctgaacctcaccttccccaacccgccccccgcaatcccatctcagctgtaatcccaacactttctcatccattatgggtggactgcttgagcccaggggttcaagactatgctggctggacaatatagcgagttgttgtctctacaaaaagacaaaaattagctgtgcatggtggcatacacctgtagtcccagtcactcaggaggctgaggtgggaggattgcttgagctggggaggctgagttggcagtgagttgagattgtgccactgtatacttcagtgtaggtaacagagcgagaccctgtctcaaaaaataaaagtaaaaaaaaaaaaagaaatatggaatacattattgttaactctaatcaaccatgctatgcaatagtccaccagtaataccagtaatagccaataatgaattatctgaaaaagaatacaatttattcttagctatctactgctaaaatttttaagctatcttttatgatagctgaaacaaaagaagtaaatttaaccaaggaagtaaaagacctttataatgaaaactgtaaaacattgatgaaataaattgaaaaagacacacgcacaaatagaagatattccatgttcatgaattggaagaactgatattgctaaaatgtccttaccacccaaagtggtctacagattcaatgcaatttctgtcaaaacaccaatgatattcttcgaagaagtagaagatcctaaaattagaaaccacaaaaattcctaaaacctgcacaaaacaccctgagttgccaaagcaatcttaaacaaatagaacaaagctagtggcattacacttcctgacaatcaaagcatactgcaaagctatagtaaccaaatcagcatggtcctggcataaaaacaagcacatagatcaatgaaacagaataaaaatcccagaaataaacccatgcatctctagctaactgattttcagccaaggagccacatgcacacaatggggaaaggacagcctcttcaataagtggtgctggggaattggatattcatatgcagaagaatgaacctagaccctatccctcaccatgcacaaaaaattaactcaaaatgtattaaataaagacttaaatgtaagaactgaaactatgaaactactagaagaaaatatagggggaaaatccatgacattggtctaggcaaagagtttttggataaaatctcaacagcataagcaacaaaaccaaatataaacaaacgggatttcatcaaactaaaaagcttttatacagcaaagaaaaaaaaggccagcagagcaaagagacaacctacaaatgggaggagaatatatttgtaaatatatacatatatatttgtaaatatatacatctgataagaagataatatccaaaatatataagaaaattatgtttctgtatagttttatctgactgggatacagaggccacatccacagtcccatcctcaaaggccacttgttcccaaaatgtcaagcacatccctcaatgatccatcatcaacacctatgtctgtaggatgaagggtgaatcatgaagcactaaaaaggaagaaggaagccaatcccaaaacaaaatgatgcagggtctggaaagtccaaagcattttttttttttttttactgcatcttcctcctttcttctccacattcccaatcctcactattgattaacaaaacaaaaaaaactgggacccaccatcttccctactgtcaggagatctagcgagattgtttgagtcttagaccaaactttgccataagccaaatttctggctgactttacaatgatatgagctagcacagtctctttttctgccagtcaacttgtgctcggttttatttgcaaccaaatagaggtggtaaccaaatataggtgaccctaaaattagtcatcaggatgaaatcctaaaatgtgcaacaaactgggttgaattcaggattagtagcaacatctctgttgtgggcttgaaaagggggcacccttttatgcagtagcaaaattgctaaattgttgtttgctgagtctttggactctcatcccggattttctatgaccattcaaacagggctgcaatgaacatctatggttgtttagcttggcacacttctacatttctatatagtaatatctagaagtgcatttgctcaatcacaagatatgcacattttataattgactgctatcgaactaccttaaatagccttaatttgttctcaacattgtttaacagggtctgtttaatgtcctacgtccagcaaggacagtatcacttttcttaatatttttcaaattattggaccttaacaaatacttaatgtgcaattaattgattcctttgtattcccatgccttcttttatatgtttccttatagtacacaaaaccacattattgtttctttacttgtgtcattccaccctggaccattcctatctaaactataacattatgagagagagagagagagaaaacaatatgaaaatataaattgattaatcaaaaaaatttaaataggacaaatcaggaagacacaagagagattttaaaattattcagagaataccacaatagctgtaccaatatattttaaaacttagatgaaacggacaactatctcgataaatgtaaattaccaaaactgactcatgaaaaaatggatattatgaatagagcaataatcagtaaagcaattaaaaagacagttgataatttttatttactgacaacaataacaaaatttcaggtcctgatatttttatggtgaattttaacaaattttcaagctcctcctcaaccaattctcagaaggtttaaaactttaacaagaaaacactttctaacacattttcagaagctgttatagcatgataccaaaaccacacaagaaaattatagaccaatctcacttacaaatatacatgcaaaatcaaacaaaatcttagtgaaccaaattcagaattaataatagcaaacaagcaaaatatgttatcatacgtatggcttatatcaggaatgcaagtatgtttcaacatcagaaaatacttctccacattaacagactaaaggagaaaaacgcttgtttaattatctcaataggtttttagagaattttgaaaattttataaagttatgcgtattctgtaaaattgatgaaatccaaccttgatttatttttaaaaattgcctttcctatagaattataggtaaaggaaacacatgcatcctcacagagctacttcaaggctaagttacttcccataagtaacgtatcctgtaatgtgtgcttggcacatattcaatactaaacaaatatttgcaaatcctcaaaccacttctcgctcaaataacccacctttgtcttttgcctttatgttagggttgattttctcaattgtatcttggagatcctttggtgggtctttcagcaattaccctgaatttgcttttctgtttacaattttaattcctgggaactctttcttgttctctgactgcacccttttcatgagagttcagccatcaatcctccagaaccccaccccccccgcccccccaaaaagcaataaagatgtctaaaagcttccttctgggctttcgaatgatgtttaccccaggcatttgttctattcgttcatcacccattttccctacaacttgcctacacttgatatcagatttttatttattagtcacctatcttcttcattggcccattttcctattttgccactggttgttctcaaatgtgttatgattcctggttgtacagtcaagtggttgataatcttggatatacgataaagatttgctctgtagctgtgtgtaagcctatataaaagcttttgtatttttcttcttaaaaaagacaaaagatggttgggaagatccctccagttcaccagttcgaggctgcagtgagctatgatagcgccgctgctctagcctgtctgtctgtgaaaaacaaggggggcggggggcgggggggaagactggagatgtaaatctcccgcagggccctacccgtatccgcaacaggtctctaacaggaacagcctcaggcctgtgttggaacaaggtaggttacagaaatctggaagccagatctgtaacttcagggtaaggactggctctcagggctgatcccccgggctgggtgtcccagaggcacccgcccccgccccttccccaaggcaggccaggacaccttcactcctctccttaggctccccacccccttctcctccccactgtgcctcctggagtagcggtggcggtgccacaggggagcggggcggggcgggctctgagggcaagggggatgggccccgccggggtcactggcggccaccctggaaactcgacgcaggccggcccttctagtgaatcgtcccagccacagctggcctcccagccgcgcttggggcgcctcggggcgcgaatggtgcaggttggggagactcaccacgcaccgtcgggggtcggtccggttattcctcaccgctcggctccagtgggcgcgcgggcctctcctcctcagttcctgcgctgcagtccctccctcacccttcgcagcttgggaatccaactgtgtcattccgacggagcgccgtgaggacctccgagggtgttagcgccaagtgatctctgtccagcgctctgaatatccaagtaaaggagttcaatgaagggcgggtcaacggaggagaaaccgtgactctctcaagggagcccaaggcctccttgtctaattagtgacgcgccaatggatggaggctcttcccaccatctcttcccagcatccagtgacaccaccgccaagggacgggctcggcggaacctgcaggaaagaagcatcggctgagcctgactgcagcgctgtgaagagacaggggaggggatcagtagttggtcccgcgcccaccccctgtttccgcgaggggcggagttgactggccatgcaggcagagggcgaaatgtgaaattccactactcctaccgtttttccctgacccgatggggcggagtgtcgtcaggctaagttccctggcggtaaggtggggagattgaggcgcacacctgccgaacggtaacgcaggattagctaaggcgagctcaggacagaagcctcccgaggagcaggagggcaaaataataaataaataaataaataataaataactcactccttggtctttatttgcggcaggaattcagaaggtgaaagcggggccttaggatctttctgaccttttgggttttaagcaggaggtgtcagaaatgttaccacagggctagctggcttgtggccagcaagcgttcacaatgccctcgatttttcatccctctctgtgggttctttttttcattgtaaggcagaatttctacgattgctcacccactcagagaacctgagctggtttagaccaggtgagacaggctaggtttaccctggtgatgatgtgttgttgccatggcgatcctgcccagtaccagaggccctgcagattcagatgcttggtgcctgtgcttggctgaggggccaatgggtgaagctgccatctgcgggatgatgactgaagcctctaagtcagaatccgcccaggctgagccttagggcagctccatggagcctcggctggcctgggatagagagtccaccactgtgccagcccccagccactgcctaggtcctgtgctgagagccccttgtccagggaaatggcgtccagtggaaaagggaccacccccttgcccttcactcaaggcaggttggtgacaaccctgaagctaatccgttcctagaggagctgcttctgggtccgagttttctctgcagcagagcagctccctggatgggatctgttcaaagtccgcctttcacgcggaattttccgtccttgcaattttccacctccaccactaggggatcctctctgaccgcctcatgccggctctggcctctgagcaggggtttctcttctgcatgtgcgaccttgcgcatgcctagtggccttttgggacctagagctgctccacaccccgatggggttacagagtgcctcgcctccactccaccccaccagggttccttccctggctgggatgggatttcagaagcgccgaggaacagcccagacaggtgtgggagagtagccaaggcccctgtcccggggtggccaggacagcggtggcctcgcataggacctggctgggctgctgcaatcagtgtcctgccccttggagagcaacagtgaaaacaacaagactatcttcacccaccttaagaaagaacagaaccagtatccccaactctgctgtgtatcccaacccaattccattccccaccccactctcagtagccaatatgcaaaatattagaatactcttactgttattattttcaaccacactctgcatcctgaaaaaccatatatttcgttatgtgcttttaaacttcttgaaaatgaaatactgaggctgggcgcagtggctgacacctgtaatcccagcacttcgggaggcggaggcaggcggatcacgaggtcaggagatcgagaccatcctggctaacacagtgaaaccccatctctactaaaaatacaaaaaattagccgggcgtggtggcgggcgcctgtagtcccagctacttgggaggctgaggcaggagaacggcgtgaacccgggaggtggagcttgcactgagccgagatcgcgccactgcactccagcctgggcgacagcgccagactctgtctccaaaaaaaaaaagaaaaaagaaatactgaattttcaaatacttgctttttttttcggtcaaaattatgttctcaaatttcactcctgtagatgtgcgtggctggctgtagtttttgcatttttattattaggtattctcctgttgcattaatatgccacattttatttctctcatgtttttggtgaccacttggggtgttttttggttttgtatttttgctgtatacatgctgccatggtggacatacctctttatacatatttcctgttgtatgcagacacaattttaggatgtgacatcttcagcttttctattgtgtcgtgtgtcttttccttcgtgctttgtgttatttacatattctggacacagattctttgtcaactgtatgtgctgcacatctctttcccagtttgtgtcttcttcttcttttttttttcttaaaaaaaactttctttatagtgttttttttttctttctttctttgttttgttttgtttttttgagatggagtcttgctctgtcacctaggctgaagtgcactggccgatctcggctcactgcaacctccgtctcctgggttcaagtgattctcctgcctcagcttcccaagtagctgggattacaggtgcctgtcaccacacccagctaatttttgtatttttagtacagatggggtttcaccatgtttgtcaggctggtctcgaactcctgacctcaggtgatccaccctctttggcctcccaaagtgttgggattacaggcgtgagccacagcacctggcctgtgttctttcttaagtagatgttacttttaatataatagaatgtatcatattttgcttttatattagtactttttctatctaattcaaacacatccccaagggtctttgtgtgtagactgaccaatttctcaagaatcatgaatgaatactgcttctctttccccaatttatctgtaatgctacctttattataaagtttctatgcatgtgtagaaatagttcctgatttttcactctgtgccaccagcataccaatagcacgctgtcttaaatattaaatagcagagctttatgagacaacttgatgtgcagtaggcaattgcccccttgttactcttcttcagggttctttgttgtaccacatgaattttagaattggcttgtccagctaaaagacaactgcaaggattttatttggaagttcataattctatacataatttggggaaagtattttcataataccaagtcttcctattaatgaacacagactctctctctctctcccccacccccacctgtttagttatttatatctttatggtctgttagttattgtttattgtctttcaaccaggtttcatgtttttctacatagaggccttgcatgtgaaagtctttcttcctagcttgctattacaaattttttttaattgcactttttgggtacagtggcttgtactgtaatccccgatacctgggaggctgaggcagatggattgcttgagtccagaagttcaagaccagcctgggcaacataatgaggtccctgtctcaaaaagtttgttttaaaaattgcatttgctgttattcaacaaatgtcattgtgtctcatatatggatttttatatctgataaccttgttcaacaatcttttgattctaacaatatatcagattcttttgagttttccatatagacaataatgtcatctgtaaattataattgtttcttctttgttatttcttggaccttttattttatatttttgtcttgctgcaaggcaatatccctctatatattgtggggtcttttttctcataaagtggggatggtgaacacccttgtcttgctctctgattgtataaagcatgctttctgtagcattttgtagacgctcttttttagattgaggtaattcacttttatttctggtttactgagtttttagcataaattcaggctgaatttgagctaaagctttttctggagacatcatttgaaaaattcatatgatttactttctttaagtcaccaaagttatgatttacattgaactgagtttctactgtttaactgtattcttgggagaaaacccacttgtcactgaacaatatctgttttatttactgctgtcttgtgtctaaattttcttttaggattttttgtatatgctcagattagcctgttattctcctttctgtatttttttctggtttgggggtcaaagttataatagcctcacaataagagctaagaaaccagccctaatggaggccggggcaggaggtttggagttcaagaccagtctgggcaaaatagtgagacccccatctctatgaaaaatagaaattagccaggcatggcagtgagtacctgtagtcctaggtacttgggagggtgaggcaggaggattgcttgagcctaggaatttgaggctgcagcgaactatgattgtgccactgtactccagcctggatgacagagcgagaccctgtctcaaaagaaaaaaaaagaagaaataaaaaggaaaagataaaagagctaagcatctgtttccttttttccattttctgggagagtatgtgtaagactgtaattaactgtttcttgaataatgggagaactctgtaaaataatctggctttggtgttacctgtattggaaggatgaaaaataccaattcagtttcattattggttgatagggctactcatgctttttgttttgttttgttttgttttgtttttgagaggaagtctctctgtattgccctgttgtccaggctgagatgcaacgttgttcacaggcctgatcctggctcactacagcttctaacttccgatctcaatagatcctcccgcctcagccttcccagtagctaggactacaagcatgcagcatcacatccagcctcttttcctgcctgacccagttctggtttcctttagttttctaggtgttcatccattttatctaatgtttaatgcatttggcataagggtgctcagtgtcctttcattgtctgttgtctgtaactgttgccattttcattcctatttatgagtactggcgtcttctctcactttttcttaataatcctgctggaactttgctttttaaagaacatcttttgacttgttgattcttttttcatacatattaactattttcttattttttgcctttatatttatttcttttcctgtttgaaacattgctcttttcttactataaaaatgggtaagtagctcatgaattaccacctcttttaaaaatcttttctactgtaagcattttagcagtttacatttgcccacaagtaccacttcagctacaccctatgtgcttttacataaagtcttcatttttggtaagacatattctcaaattttaattatcacttgtttttaaatccatgatgttttatttgaaatgttgtttctaaagatacattttctggttatacttttattcttctaatttagcacagtggccacaaaacatggtctgtgcagtgcatacaatcgatgagtaatttctgagctgtagtatttggcataatatatggcaaaatttcctaagttttccatgtgtgctttaaaaaacttccagtaaaatacataaatctgttagatcaagcttctcacattgttcaaatagtctatatgtttactgattcatttgactgcttgatttatcaattacaggtaggaatgtattcaaatctcctattaaagtgtgacactcaagtggctttttaaagacagagatgccaaaccaatgaatacatgattttccccaaagcctgcacaaattctctaatgaaattttaccatgaaagtttgtttaattaaggcttactaaagcagtatgttgtcttttactttttaaacagagaatatatattttaatacatcgtttaagtttatgattaattatctattactgaggataagaatctttgcctgtgctcattcagcatttgcacttcatttatgatctgccttctcatagcttctgttaatttttatactagagacatttatttgtttgtataaatgttgaaggtttttttttgttgttgttgtttttgagtcagagcctcgctctgtcacccaggctggagtgcagtggcatgatctcggctcactgcagcctccatctcctgggttaaagtgattctcctgcctcagcctccagagtagctgggactacaggcatgtgccaccaagcaaggctaatattttgtatttttagtagagatggggtttcgtcctgttagccagggtggtctcgatctcctgacctcatgatctacctgcctcggcctcccaaagtgctaggattacaggtgtgagccaccgtgcccagctgggttttttatattataaggagatgtaatagatagatagatgtttcaaagatagtcaaatgtttttaaaatttaaaacacttttttacaggttgactttcaccatttaatttcatctatgtgttttgccttagagaaattttaaatgctatgtagatctcatgacttataattatgaagcattttgttttctgttttccacgaaacttagcttaactttgagcatataatagttgtaaaggtaggagagtaacactgaaaaaaggaattgcataaaaatggcacattttctgtagagttgtttatcgcctgaaaataggccccatttcatggaagtaagatgatcaggctcaggtccccagacgaaactcttggcatggtttttggagatagtccagggctcagtactggctctatcatttgctacttctcccaaagtaaccaatatctcatccaccctgagcccatttccatatctctaacatgaggataatagcatctaccttacacaccaagtagagggatcaaatgtaggaactaaatcaaagtaccagcactgaataacctacatcctcccacttcccaaaaggaagagagatgtatcccctgttgacaaacgagaccattttgcaggagagaaaggaaatgccagttcacttgcaatgtaaacatgctctctctttttagggatgtccagggacctgagagagaacccatgcttaccaaagagtttctagttccagacacacaggactcgaagggtgacaagtatggttttcagggtccctgaatccacccagtcctcacagaaactcctaaaagctgtcgattgacagcgttgagttcacagctctggtcctcacatgctgatactgcttgtgatatcgaacccgacaggaccccacatcacaattgatttaccaactacaatataatacctcctgaatctccaaattggctcacccaggaacaaaggcttggggtaaaactggattaggagatataagctctgaattttctgagggtgagacacacaaggattctaagtgacacgccacagagtaacgggtctgtgactggaggacccacagatttgtcttactggagacaccacatgcacacaaactccatccttagctgtggaaacaagggtcttttgctatcttagccgaattctgggagtaatttttggaggggaggagatctttgggattgcctctttcaggccctttacaaaaatacctacttcttaaatggtaaagcttacactaaactgaaaaaattacatccttggctttttatgaagtaggtgttggattgaatcactactggaagaagtatggcatcgcaaattctaagcagtggtcaaaggatggatctgttaaattagaaaaatctctaaatttataaaaagattttagattcctttattctaaacaattgacctatttgtactcatgggacaatcaaatttcaaaggagatatgtaacgatttcatggcttgcattaaaaatccttctgataaaattaaagataaaaaatctgaccccctgccaaaaaaatcttttgaagttcatactgcctgctttcaatattctgtgggattcacaatgaaaggtgccttatattgtggcctagcttcaagtttatgccttcgccaccatggcctgggttcaattcccagtcagggccccagcgcctttggtttaatgtttgcgtggcatttgacttttttacctatttagtattggtgagattacctttggtaaaaaaaagtttaaagagtggaaatcgcaattctttgtgttggctaaaatctgattataagagatctggaaggttttatttttctttttcaaagagctctatggtcagaagtcggcttcatgaaaagctaatatttaattatatgtacatacagtctttctggattttctcttttgcctcctgttttgaaaaatatttggatttgagtgaaactccgttttagaaattaattgcttggtacaatatacccatgtaactaccctgcacatgtaccccctgaatctataataagagttgaaattttgacaaaataaaattagattttgaattaaaacaaataggtgcttggttcctctgctcacttctttttaaaaggaattcctctcccatgtacttcttcttttcccttctttaccttccttttggcatctttggtatcacatgaagggatctagagggaattttaagtgactctgaaattccttgagaaatacacaaaaagatcccactcaccccttttgggggtctcctgttctccttgtggagtccagagtcagggacaggctcctccaggtctgcagctctgctctcttttatttcatcttggctgattgctttggttttgtgagtaccaggcattactttgtactgtgagagacacgtcctttgtgagtgcaacggctgctgggtcactggtgagggctgcagtttggagatggctgagagccgttgcaataaatggttgtgattgcagggggctccttgtttctttgcaagtttagatgagaaaggtgcagtttggacacagtttaaaggctgtgaaaacaccaccaatgaatatgatttcctttggggatggtctgattaaaagtgggctgattgttgctgtgctactagccttgaagacatgtttctacagcattgtgcagtgtggaaaaattgtgtggcttggtcttgtggcatgtcccttcttttagagacctcagattcaatgtgaaattcgggatttttgattttcaaagatctagatgccctgccttccagatgtgcctactcttcacatattttaaaattagatcctataaactgcaaatactttgttggcttctgtgagatcagaggtccagttagaaaaggaagacagtttgttaaaattaaaaactatttatctaatctaactagattggcctccaaatatgactttctgacattcagctggttactctgaaaagatttctaaatctcttgaggctcatctatatgtttccttgcaaagaaaaaaaaaaaaaaaaaaaagcaagcccaagcactagtaagaaaaagatttgcaatgtttcatgaaaggagtagatgagtgaagcatttatttgtagatactgggttggatacctgtgcaaagaagaagaggtcaataataaaaattgccaggggatttcttggaacttaacaagctgaattaaatatagaaatgtcaggaaatcaaggcaggaaatactcacttgtggttaggcagacagggcagggttctgagcttgagatggagcaaacagttgtggtgggtgaagttcacatgctttagagctcagctgtcctagtaaagaagcctaagagtctctaaagctcttatgagaagatggattttttttgcctagattaaaaggttaaagaattgctttaagttggataaaataaagctaaatgtttaagcaagttgtgaaaggtttatgaaaaaattaattaaaatatttttgtgtgtaaacatattgactaaagttgaaggggtataattcagcatttctgtaaattgagcattgaaataaaaacacaatgggtttctcttagagcactaacctgctctttaacaaaaattgtaaagggttatagaaagtctataaaaatgttaccttatggtcaaacattaaaattgggtaaatatgtctatcaggttttattaagaattaggtttaacattaatagtacactaatgtaaaggtgaaatttggcttatttggtacaaaaatcatacaggaagcattgtgaaatataaaatgatttttagctttctttgggctatatttctataaatatgttattgatgagggttccaaagttatgggagactcctataattctgctatatctcagtgtacattatcagtcataattataattgtcatgttaaattattgtgggccacagaggtaacagatttccttgtcaattgtgtctttgactatgactaccctaaaacgttcagtcacccatatacacatgttaccttgttttggccctctttagaaggtaattttataatcagctataaagccctaacaggtgctcttaaatgcaaattttgataactttggagattgtgacatcagaagagaggaaaaatgttcgggacacttggagagctaaaatgttcattgatatcaagcaggacaggaattaactgcatgaagtgaactaataggaggctgaagtgatctttttgactttttgcttaaaacgttgctgatcctttgttttgcttttcagagtcaaggcaaattttcttttgagctattgacagcttttaacgattaatcaaaatatactcctatgaacaccatttggagcattatttgtttctctctacccgatttccccagaatttggaaactatttgtgggtattcttaatttatggcaatatagttatttgcataagtgcaataagaatgtgttttctttggtaacaggacacaatttgaaaaactggttattttaccaaggttttgaccagaatgctgtgctttcctttaaggaatcaaacttgacttgtggagctaataaagcctttggaaaactgaccttatatcctgtgaacacagtccctgtacagggttactgatctgtgggaagaaaagaatgtcacattctgacaggtcaggaatcccaagttatcttgaaacttcaagaggacaggaattcacccaaccatatgtatttgatggtagaaatccatggcaggggctcagctttaaaaagtcttatctcagattccttctataaaacaaagtcccattaaaaccaattttaaaagcctatgtgaaaaataattattcttgctgcacctcgtacaaataaagtggcaaagcataataaagcaaattggtcctgtcgtaatttgtctttagtaaaaacgggaaactggggtcgggtgcagtggctcactcctgtaatcccagcactttgggaggctgaggtgggcagatcatctgaggtcaggagttcaagaccagcctggccaacatggtgaaaccccatctctacaaaaatacaaaaatgagccgggcatgatggcgggtgcctgtaatcccagctactcaaggggctgaggcagggaagcggaggttacagtgagtcaagatcgtgccacttcacgacagcctgggtgacagagcaagactccatctcaacaacaacaacaaaaaagggtaactggagagagggaagttatgtttcaaaaacttttggaaactatagtacacctgtttttaaattctagtctggcattcagtttttattattttctacagtttgggttaaattcgtatttctctggctacaagtctcctaaataatcttttcatttgtttcctttttctttccctttttccccatttttcttaattggaaatcactgaaacctaagctgtgctttcttaaagccctgtgaactgaagactagacaaccgaaacttctgaaggaagtagcagcaacctatttatatgtgttgctgttgcctactattatgttttagcaggtgctgcctctacacccccgaaacagagagtgctactgggaacaaatcgactttttccactccagtgctgcattcggtgccccataacgatgaccccctctcagcaggaagtagccagaaagattacaatgctccatctccctatgattcttgtgataaataaatatacaagcatgatagaaatcatgcgcaaattgacagtggggattgtggcaggccagatttcactaatggaggtccccatcacaactacttcagtactgactgagtggttaagttcagtatcaaaagctgaaagtgccagcgcctttctacaaaggctagaatgtaacaaaagcccaccaagggttttacctaggcctttcctgggccttacagcatgacaaaacaaagaaggaattcttaaccagacctgtttaggattaaacaaatttaattgggggtctgaagaaactcgccaggcctccacaaacaagttcattgggggtctaaaggaaccccccccaaacctctgtgattgagcaggagacaaggtcagggtaattgccccagcacctggactcatttagatttaagtaaatgtactgaggctccagagaaaggtctccaagacttagactagagttacagattaaaagaagttaatcacttatatctttagataaatgcacactgacacgtagacatacatcttagaaaatatataagctctggaaaaccttgtaatttacagttggtctggagatattttctgggccttctctctgtaaccggttccagaaataaaaaactctcttcctccccagtttatctgcatctcgttattgggccgtgagaaatagcagccagaccctgagtttggtctgggaacacactggctgggcttcctgcctggcggtagagcttcactgtcctccttcccagccaaaatgtggcccttgaaggcttcctccccaactgaccggttttgggttctaggtactcagggaacaccgtcttcaaggaggccattttcatactgttcctggtttgatttttctgaaattaggaaatgccccttgaggcatccaggattgtctttatttcccctgaagcttcccctcctgaagaaaaaagttctcaaacaccctcaggactcaaaccccaagttcaccctgtgaaacattcccatttcctaaacccaggcaggctcatggccctcagcctctcagaccccatggaaacctcctcccccacttcacgggttctctccatattgagagcctcccctcctcggcacacaacccagagactcaccccaacatgtgtagcaaatcaccctggaaacaatcatggctgaacgtggtagcccatgcctgtaatcccagcactttgggaggcccaggaggtggatcacctgaggtcgggagttcgagaccagcgaggccaacatggtgaaacctcgactctactaaaaatacaaagttcactgggcattgtggtgtgtacctgtaatctcaactactcaggaggctgaggcaggagaatcacttaaacctgggagacagagattgcagagagccaagatcgcaccattacactccagcctgggcaagaagagtgaaactacatctaaaaaaaaaaaaaaaaaaaggaaaaggaaaagaaaaaaaaaatcatgaggcaacattgcatttaacaatattttatttatcaaaagacacttgtctttctcaggtaagtgaaggtctagagatgaaacgagtcccgatgtaaattgccccatgggcattgctgagatcacaagatcatcactgcagcatgcagcacaatagtaaatttctcaggatggaagttcaacaatccaaaaggtagtattttttttcatgatgctcagtccatcatacgaaataaaaataaattccttttcatgatcatccattcagtagaaaaaatgatagtaaatttgttctcatgaagatttttaccgtaacatataggatttatcgttattattattattctttgttttttgtttttttgaagcggagtctcactctgttacccagtctggagtgcagtcgtgcgatctgggcacactattaacctccacctccagggttcaagcatttctcctgcctcagcttcccgagtagctgggattacaggcatgcgccaccacacccggctaattttcgtatttttactagagatggggtttcaccgcattggtcgagctggatttgagctccggacctcgggtcatccgcccatctcagcctcccaaagtgctgggattacaggcgtgagccaccgcgcccggcctcaatttatcattattcacgcatccacaaactgggttcttatattttgtacgtgattttttccattgaggagagatatctgtgcatattcatgctgctcatatttcatccacaaactcggttcatatttcatccacaaacataattttttccgttgagaagagatacttgtacatatttatgctgttcaaattcacatttcatcattcttttacaagaaatagataatgtattttaaggttttccagtggtattacagatattttactgggtgtatagatagaaattaaaccaaacttctttgttctggccgccagtcatgcatcctgttttcaacatagttcacatacaactggttgtgtaaaaatgaaattattttgtttagtacaatcatcaacagttggttgattagatttttaattatcaagttaatcattgtcattatgcttctcatcgcactcgtcattaattgctgtgggaggaaatttgttatgttccctatgagagggtgtatcacaaattcaaataagaattcaacgacaatggactgtataaaggaaataagcaagtccatggaaaacatatttttttccggaaaggattaaaatatttttaaaaaggaattaaaaaaaaattgggcacggtggcaaatgcctagagtcccagctgctcaggagatggagacagaaggattgcttgagcccaggaataagttggaggctgtagtgaacagtgattccaccactgtactccagccagggcaatagagggaaaccctctttctaaaaagacaaaaagaaacaaaacaaaacaaaaaaacaccacatcaaaaaacccaacaacaaaatgaaaaaccaaataacagcaatacaattggagctattcgatccaaagaagtaaatgaaacataaagcaaataaaagagaaaagctaatacctgtgtcctgcaggactcagtccaagttctgctctgactccctcctggtgagccaccccttaaaaagtcacttggggcggggttactttgacagacagtcttctgtcaaagagggaggcggtaaatagcacttttttttttttaatttaacgcctttccaacaaattagcggctatgttgtctaagagtgcaaatgtcagaggtgggtacaggcagcaagaccctccccacaggggcagcagaaggaggaatgactaagggaacaagactttagtgtgctcaactacacaggacaggaaacagatgctttttacaaaagctggtggacttgaaggcagaatattttcaagttcctgtaactgcgaactatgacctgtagcctgtgagagtgactttctgtggcaaaggagcttttgtgaatgtgaggaagttaattatcttaacagtgggaggttctcccggcttatctagctagaccctcgtgaaatcccaagtgtccttaggaaggggaagcagagagagatttgagtccagaagaggaagaaggtgatgtgaggcccagtaggggaacaaagggcgatggcatgtaaacacttagcccccagaagtgggagagggctggggttcatcacaccagaatccctaacaatcagccttattttaattacccttgaaatggaaggaggccttagagagccagaggcttggaggggcaccctctgctgcatacacagatcccaactgctgtgggctccaaataattgcaccagggaaatcacaaattatcaaaaataaaggatgtaaagcttttaaaaaatattaaaagcccaacaaataaaaaaagttctaaatctataaaattgacctcagtctgtatatttagatgagtcatgtgtatatagcgtttcacttcaaaatatatgataaatctctcattcattggcttaaaaataaacacttcaatcaagtctttatcagaaaaattgaaacgttaactcaattgccttttagttcatgtgactttacaaaacttaaaacaataaagtcagttttaaaaattattagtaaagtaaaagaaaaatatcttcacaatgtagacattttgtccacatgagacatgtgaaatattgccattactaaatatttgcaggtcaaaaactgtttccaaaacattttaaataatcatctggcctgtctgttttagagcattcaattctagctgaggtctggggacatgtgaaaggagccacggcccgactccgtgctgggaagagtcagacattttccacagctctgtcctttgctgtgggctctgcaactcctaccaattaaaattgcttacgtttttgttttatttttactaaagaggggttcctaaaagctaacattatactgagtatatgtaactaaaactactaagaaaacaatttcacaattatacaaatgtgccaagtaaatgaaaaaataaactgtattttaataaaggttataaaaagaaaaacatatagtggtgtgaggactgtctcaggtcttcactgagcaagggatcatgacattctatggcggacagctgaccttggctttctgctcctcttgattatgtctactaagtgacatacttactctttttccacctgtcttgcctctaagggtaacaggttttatgagatccctcctagtgctttgcaggtcagcctccctttgctgcattccaattttactgcctataccctccagctggcttttgatgacaaaagtcctggtcccagccattctcagattctgtcatccccgtgggcactatggagctcagcactatgggaggttccccaaaaatctcgttttctatgaggaatggccaccacctgcatctcagtgatgctagtgacccctttcctactcctgtgctcactggtcctcatgaagatcctggttggtctgtagccccctatttttcctattaaagagaaattacagtaagacccatttgtgtgcaaaatcaattttaggcttattacacttggcctgataatttgcataaaatgcagcaagaattcatcggccatataggctacttttgagttaattttcctgggtttttacctaaaaatatactattttggttagagtcttgtgaaaataaccaatgtgttcaattgttttattttaaaaggctcttactgaacactataaatatgtataagttgaatatacaaactatattgtcataaaatcacaacccaaaatgtggagaacgcagagggaaaggtaaatttgctcgcaaaaacatacttcacccaaataactggaaaaaaaaaaagactttcatgacccttctttaaccagagcagcagctttcaaacaaggtgtttgccttggaaatgccattcacaagccaaacggcccttgagagctgtctgtcaggcactgtagaatctagcagctcctcacagagttagaaatagtttcaggaaagagattccctgcttttagtaactgcactttatattcccagatagcgagattgtatgtaaaccatttttatcttattctggaactcttttgggtactttttttttttttttttaaatgatggagtctggctctgttgctcaggctggggtgtagtggtgcgatttcagggtatgagaaaatgcagctggacctggctctttccaggaagaccctcacagccaaggagtccaaagcctggggttttcatctaattccagtgtgactggggtaggagcagctttggtgctgggtgtgtgtgtgtgtgtgtgtgtgtgtgtgtgtgtctatgcctgtgtctgtttagggtgttaggctcgtggttgtctagatacaaatgtcccagggctcaggagccccagggttatgtcaggggcaccagatgaaggtgtcaacagaagttagggcacaagggacaaaggtgagagcaaggttagattcatttaggtgcaagaaatcatagagggaggagggagaggaagccctcctgctaccaccgaggaagaagcgcagcttaaggcagaaagcctgtccggagaggaagtgagtttgagggcagggctctctgggtaaagtacggtctgggacaccagcctgggggaagggtacagaatgcagagtggcctggcgtggggactaagaacagaggagagcagctttcactgggagggtcagtgttttcagtgtccagcactgagcaaggtgagatttgggcagcttgctgtgaaataaggtcaggctctggcattgtccccattgcgtgtgtgtgtgaggggcactttgggagagtgaactctccacctccatcctctcatacgtccttcaaccgagcttgccagttaccctgattccaaggagatctatttattgttgacaatactggatcctagcagaggctgggtaggagcctgggcacaagcaagtggaggagggggcctgggcctgaaagacctgggaggtttgagagaggacacagcccacagaatggagcagatggggtagagtcggcaagcattcagggctcctagtaagttggacaatggagaccctgaaagatccagtaaaacggggagaacaaacaggtccccaactcacatccttgcagtgcctggagcttcagactccagacaggtggggaaggaaaattgagggatgtgaacatgttggagaatgtcgtgccctgaagaatgaagaaaaggggggtgaggaatgagagcaggaacggcttccagtgcctggtgcccaggagaactcagaaaatgggtgtggtggagaggaatcgaggaaccggaagtggtggaagtgtgcagggcccctccgagatcactgtgactgccaggcgtcctccctggctggagagcttcactgtcctccttcccagccaaaatgtgtcccttgaaagcttcctccccaatggactggttctgggtcctatatatttgaaggggtggcctgcctctccacacctgtgggtatttctagttgggtgggaggagagacagagaaaagaaataagacacagagacaaagtataaagaaacaacagtgggtccaggggaccagcactcagcacaccaagggcctgcaccggcaccggcctctgagtttcctcagtttttattgattattattttcattatttcagcaaaaaggaatgtagtaggagagcagggtgataataaggagaaggtcaatgaaaaacatgtgagcaaaagaatctatatcataattaagttcaagggaaagtactatgcctggacgtgcactcaggccagatttatgtttctctccacccaaacatctcagtggagtaaagaataacaaggcagtattactgcaaacatgtctcacctcccgccacagggcagcttttctcctatctcagagttgaacaaatgtacaattgggttttacaccgagacattcagttctgaggggcaagcaggagacagtggccttcctccatctcgactgcaagaggctttcctcttttactaatccacctcagcacagaccctttatgggtgttgggctgggggacagtcaggtccttctcatcccatgaggccatatttcagactatcacatggggagaaaccttggacaataccccgctttcaagggcagaggtccctgcggctttccacagtgtattgtgcccctggtttattgagactagagaatggcaatgacctttaccaagtatactgcttgtaaatattttgttaacaaggcacatcctgcacagccctaggtcccttaaaccttgatttcatacaacacatgtttttgtgagctccaagttgggtcaaagtggctgggtcaaagtggctggggcaaagctacaaattaacaacatctcagcaaagccattgttcaaagtacaggtctttttcaaaatggagtctcttatgtctttcctttctacatggacacagtgacagtctgatctctctttcctttccctacatatattcatggaccacagtcttcaaggagtccatttcctcactgtttttggtttgatttctctgaaattaggaaatgccccattgaggcacccaggattgtctttacttcccccagagcttccactcctgaggcaggagcttctcaaacaccccccaagactcaacacctaatttcaccctctgaaaccttcccatttcttaaatccaggcagggtcatggtccttagcccctcagatgctgtggagaccttctttccctttcatacattctctcaagattaaaagccacccctcctcagcacacaccccagagactcaccccaacatgcattgcaaatcaccctggaaacagtcataagaccacactcatttaataatattttatttatcaaaagacactctttctcaggtaagtgaagttctggagaggaaaagaggagtcctgatgtaaattgccctgcaggccttgctgagatcacaaggagattgttactgcagcttgtagcacaatagtaaatttcttctctggatggaagttcaacaatccagatcgtagtatattccttttcattatgctcagtccagcaaatgtgatgataacaaattccttttcatgatcatccattcagcagagaaaatgtttgtaaatgtgttttcatgaagatgtttaccataacatacaggatttaccattatcaatgcatccacaaactctgctgttgttttttatacataattttttccatcgagaagtgatagttgtacatattcatgctgttcatatttcaaccacaaactctgctggtttttttatacgtaattttttccattgagaagtgatacttgtacatatttgtgctgttcatatttcatgtttcatcatccttttacaataaataggttatattgtattttaagtttttctaactgtagtgcagaaattgtactgggtgtatacatagatatcaaaccaaatttacttgttctggctgataatgcatcatttatttcatagattatgtatttctttgacacatttcacgtacaactaattgcataaaaatgaattttcttttagtatagacatcagcatgtgcttaattcggaatttaattgttgagttaaacatcgtcattgccttttccgttgttattaattgctctggtgggaattttgttatctcatacataagacagtgtgccacaatatctcttaaaatttcaatggcaataaactttatatttaaaaacagggaatctatggaaaacacatttttttctaaaggattaaaatatttttttaaaataattttctaaaaagttaggcacggtagcaaacgtctagagtcccagctactcaggaggctgagacaggaggattgcttaagcctacgagttgggggctgcagtgaactgtgattgcaccactacattccagccagggcaatagaagttaaccctttttctaaaaaaaaaaaaaaaagaaagaaagaaagaaaaaaagcaacaacaccaaaacctcaccaacaaaatggtaaagaaaaaaaaaacagcaatacaatgtaagctatttgatccaaagaagtcaatgaaatttaaaacaaatgaaagggaaaaagtaatacttgagtcctgcaggactcagtccaagttctgctgtgcctccctcacggtgagccacccctttagaagtcacttgggtcataagttaacccgataggaagtgtcctggccaatgaactagggaggtggtaaatggcaccattttaaatttaaattcacggccttttcaacggatcagtagccatgttgggtaagagtgcaaatgtcagaggtgaaaagaggcagcaggaccctcccctagtgcttgggcaacagaaggtggaatcactaaggggacaagactttagcatgctcaagtacacaggacagaaaacatgctttttacaaaagctggtaaatatgaagagggaacattttcaagttcctgtaaccaagaactaccgcctgtaaccggtgaaagtgactttctatggcaaaagcgtttttgaaaaggtgaggaagttaaatatcttaatgttgggaggttcttctggtttatctggctagaccctaatggaatcccaagtgtccttatggagcggggagcagagagagagatttgagtccagacgaggaagaaggtgatgtgagtctgggtgcgggacagggggagaatgatgctatgtggggatctgggctggggaatgacttagctgcatgagcggagtgacttagactcctgaactagaagaaatctagggctcatcacctcagcagccctaaccatcaaccttatttttattacaggtcttccatcgacggactccctaaaaagccagcggcgtggaggggcgccctctattggacaaatagatcttgactactttcggccctcaaatagcctgactaggcaaataacaaataataataatttttttttaaatcatggaaaatattttaaaaaacaattaaaaagttataaatctataaaatctgcttctgtctgtgtgtctgtatatttagatgtctcatgtgtacataatgtttcactaccaaaatatatgatgaaaccctcattaatcggcttagaaaactaaacacctaaatattttctcagaaaatacaaaaactttaactcaaatcccttttaattcacctgactttaaaaatctttaaaaaataaagcatgctttaaaattattagtaaagtaaaattagaacatcttcagaatttagacatttggtttaaattatacaggtcaaatactgcccttagtaaatattttcaggtcataaacaactcctgtaatcttttaaataattgaattacatgtctgttttagagctttaagttctagctaaagcctggggacaaatgaagggcaccatgccccctctctgtgctggaaagagacattttctacagctctgacccttgcagtaggctttgcaactgctacctatcaaaattgcctacatcctaagtttattattaaaaggagttgcttggagttaacattataatgaatatatgtaactaaaactatttctcatacaaagtatatgaaaaagtagaatgtatttttaataaaaagttataaaaagacatgaacatgtagtttttataaaaaacagtaattttgtctagttttgcagttctaaaaagttatgttaaattcaaaaataaaaaataacaagacaagactcaaggtttaaataagttgtaaaagatttgtaaaaattagttctataaaaattttacaaaaaaaagcattggttaaaatttaaggaattattttgtttttacagaaattaaacattcattaaaaacactctgatacaaggccttaatttgggttcatgtatcagaatagcagggttttcttagaatattaatctattctttaaaagaactatgaatgttatgcaaactttataaaaatcttaccttagagtcaaactgattaaaattccatagattttacgtaaaattttattaaaaattaacttcaacaaaaataaaatttgattttctcctttaaacaaaagttttgcgtaatattaaataataaagcatttttgtttaccttttaaactataaacacacacacacatacacatacaccaacactaaagtcagctgacctcatactgtctttattggatattcttgtttaaaaaactatcttctttggaaaataaagttttttattttaaaccatattttaaattatcattttgactaaatccataacatacagtgatctgtaataattctattttataatatcaagtgttttgaagaactccaggaacagccatgagagaacactgtggtttagtaacactttatttcctcagtttgaaaatagttgtctttcttggggaggccggtttcagcagatgaaaacaagagtcatgatgaaaattacccagcagtggttagtgtgaccataggaacattgtcatcaggtcagcagaaaacatatcagcaaatttttctcatactggcagtgtgtaggggtggatgtttacagttcctgaagccccagtggtcgtgtggtcttttagttttgccatttataggcaacttgtggtaactagctcaattagacacattccttatcacaaggacagagggctttctgtatcctagggttcttgccttggcattccagaagaatcaggtcacacgtggacgtggagaatgagtgcaaggttttattgagtggaagtagctctcagcagatgggggagccagaaaggagattggtttctccctggattggggccgttcagcagccctggctctcctctgactgccccaggcaaaatccacatcgttctataagtcggtgccctgctggtgtgctggtgcctgttgtcatgttcctcttcatgtccagccgcctgtgtgttcctccgctgatgtgctcctctcgacgtcaagcctcctgtgtgtctgactgctagggtcttggggtttttataagcacaggatgggtcttagcaggccaggatgatcttgggaaagacaacattcggtcaggaaaacaaaaatgcctgttgtcatctaggtccgtggggacaagcccaggtgtggagcttttagccagggaccacagcctcctgtatccaacacttcccttcaccttttctatatcattcaaagggatcatgcccttcccatcccagcacttcactttcatgtcatttgccccctctgaagaggtacatctaactgccattagaatatggatgatgaccagtcttagctgcttcctgctgaaagggggcattgttttgggggaaaacggcagtcagattcctcccaggggtctctataataaaagatcgaggtggctactttcaggaggtcctctaatgtactatctggtcccaagtcccatttctgcaacctcctcctgatgtcaggagctgcctgagtaataattttatcctttaggattatctgtccctcgattgaattaggagatagagaggtgtgatttaccaaggcctctcttagcctctccaggaaggcagtgggattttcatcaaatccctggttaattatggacaacttagtataattgagaggcttggtcttagacctacgtaagccctctattatgcacacctgaaagtgtctcctcttccagtcttccatctcattattgggatcccatttagggtccttcactggtgctacttctcttccagttggataatattcgctcccttccctgatgctataggtgatgcaaagctcatccccaaatctctctgctgctggcagagcagcctgcttctcagtgtctatcaggttctgactcaaaagtaacataacgtctctccaggagagttcaaatgttagggtgaaattctggaaagcttctatatatctatcagggtcatctgaacacttgcccagatctcccttaatttgctttaagtcttgtagggaaaagaggacttggaccttactgggcccaaattcactgggcatctgtaggaggggcaagagtgagactgggcttgtttgggatgaagatttctaggaggggccaggtgagaggctgaagctggatacggaggttggggtggacccagaggagcagggcttgagggagctggcacgtcagctgggggtgcgtctgggactcgtgtctttaattccctgggcttgaccctggcagccttccccgagacagcaaacaggagggctggaacaatcctacatgtcagcaaaggtctggattgctttgcaaggtatagaaagcctgcacatttggggcctcagaccatgtgtcctcacatccagagaaaagttctaattgcaggatggtattgaaatgaatggtcccttcctgaagccaagccagtccttcctgtaaaccataatttggccaaacctatgtgcggagggctatgagatgcttttcctctggattctgagggtcaaaacagtcccaatggttcaggatacactcaaggggagtacaagctgggggtggtgaggagaactggctgcccattctgaaagacagggaatagaggtgttcctcatttcccttccttcttttggcaaaaagctcagggtgtgatggggagggaaagcaagcatcttcacttcactttccacctcttacccctgcgccctggcaaccttggcaggtgccggccacaggtacaaatgcggtatgtacccatgaagcagggagaacctggagattaggaattaactgccctcacctatgtttccttttctccctgctgttgaaaaactttgagttccctgggcctttttatcccatgaggcatggcctccttctgtgggatggggttcagtcagcaggaattggtcctgtccatttacattgtgcctgttgcctggctttgaattcctcagacctgctttctctttctagggcctcagcctgaagcttggaattgagtttgggactgaaaaagcatttcagaggctgtttatatccatttagtgcctcaaataagccctgctgaatttgcaattatcagccagcaggggtcactcctctgttaacttccctattagaaacagagcggtggggattctcacttagaaaagaaaaaaagagaaaaacagttaaagaggcaaaaagtggggaatgctgggggaagaaccccttgcttagtgcaagtgggcccctctaatccttataactttcccatccttcccccagttcagaccaggttgaattccttggccatggaaggaaaggttccattgatgcagtgggtgagaagcactctgtagggtcctggctaccatcggttttctcacacccccctcatcccaggcagtggagggagacacttctgcgacattgctccccctgccccttcatggctattgggtgtggcctttgcctgctgcaggcatgcctaggtgctggagctgggagggaaaagggtaaggagaggtgccctggaagccgctcatgcctggggctgtcaaggtggaggcatacatggcacctctaggaaaaattggtctgatttgcacctttggcggctgagccaaatgctcattttacttagtaacattgcctcagcctgtagcaaaactcttaacattataaaggaagagataagatccatttcaaataatgtgtgagagagaaaagagatgaaaggaaaacagagtcttttacctgcaggaaagggagagaagtggcagagttttggaagaaaggcaggcccaacagtttcccattcactcacactcaccttccgagatcccagacgagccaccagttgaaatgggaaaagtttccttgtccccctcacaggaggtggagtgggggtgtggcttgcttctttagtactccgctgctcaaacctctagggaagcatacagactggcaagttgtggggctacaaccccatggcagcatctaggggtagatgtttacagctgctgaagccccagtggacatgtggtaccatgtgctcttttagttttgccatctataggtggctttgtggtaaccagctcaattagacccattccttaacccaaagacagagggctttctgtatcccgcggttgttacctaggtgtaccagaaaaatcaaatcacacgtggtcttggagaatgagtgcaaggttttattgagtggaagtagctctcagcagatgggggagccaaaagggagaatagttttcccctgaagtcgggttattcagcggcccaggctctcctctggctgccccagccaaactctatgtcaatccattggtcggtggcctgccagagtgctggtgcctgttggtggattcctctcagcgtcgagagtttttccctctcaggaaagggagagaagtggcagccacccatgtgttcttgcactgatgtgctcctctcgacgtccaacctcctgtgtgtctgcctgctagggtcccagagtttttttaggcacaggatagggcatggtgggccagggtgatcttgggaaatgcaacatttggtcaggaaaacaaaaatgcctgtcctcatctaggtccaggggcacaagcccaggtttggagccctagccagggaccccggcctcctctacccatcactttccttcaccttttctgtatcattcaaagggaccatgcccttcccttcccagcacttctcttctgtatcaataggtgatgtttttaaaatttcccaactctagtgcaggcatggtactagacatatacatagaaataaaaccacacttattcttctggctggcaagacatagtatttttgccaaattatgtgttgttttgaagcattttatgtacccctggtcatataaaaataaagctattttgttcagtacaaacagcagcattttctggattagaaagttaatcatcttaaaagatcatcacggatttttccattgcactcatcactaattgctttggcaaaaaatttcttatctcacgcatgacaaaatcagccgcagtatctcctagtaatttaatggtgatgatctttataaaggaaataagcacatcaagggaaaacataattttttttaaaaaaagagtaataaaactttttaaaagtcttttttaaaagactgcttttctaaaatagtaaaataaaactccaccaataaaaccaccaacaaaacagaaaagaaaaaataatgatatgatcggagctatttgatgaaagatggtaaattaaatttaaaatgattagaagagaaaaagcaatacctgtctcccgtaggtctcagtccaggttctgctatgcctttctcctggtgagccacctatttaagagtcgcttaaagcatatgttaatccaacaacagcagattaaaaaccaatgcaatctgaactatttgatctaaaaacataaataaaatttaaaacaaataaaagagaaaaagcagtacctgtgtcctgtaggtctcagtccaagatctgctctgactcccttgtggtgagttagccctttagaagtcacttggggtggggcatatgttaattccactaacattggttctggccaatgagtcaggaaggtggtaaatggcaccttttcttcttgctgatttctttcagttcctttggagtctggacattagtcctttgtcagatgcctagtttgtgactactgtttcctatactgtgggttgtgtgtttaccctgctgatatttcttctgccttgcagaagattttcggtttcattaggtcctattgatcttattctatttttatatttttgcgtttgcttttggggcattagtcatgactacttggcctaagccaatgtctagaaaagctttttggatgctatcttgtagcatttttagactttcaggtcttagatggaagtttttatatgctttgttaaagatcaggtgactgaaagtaccgggctttgtttctcggttctctattctgttccattgctctatgtgcctatttttatacttcctgcaccatttattgaataaagtgtcctttccccaattagtgtttttgcatactttgttgaagattagttgtctgtaagcatttggctttatttctgggttctctattctgttccattgctctatgtgcctatttttatacttcctgcaccatttattgaataaagtatcctttccccaattaatgtttttgtgtactttgttgaagattagttgtctgtaagcatttggctttatttctgggttctctattctgttctattgctctatgtgcatattttataccagtatcatgctattttggtgattgtagccttgtagtataatttaaagcctgccttcagatttgttctttttgcaaagtattgctttggatatgcggtcacgtttttggttttgtataaattttaggattcttttttctagttctgggaaggagaatgatgatattttgatgagaattctactgctctgtagatggctttggagagtatggtcactttcacaatattgattctacctattcataagcttataatgtgttcccatttgtttgtgtcaactgtgatttctttcagcactattttgtagttttccttgtaggaaacttacattaacctacttggttaagtatatttctaagtattttacttattaaaaattctcagggaaatgcaaagtaaaactgaggtgggaaattaaagaaaaataaaattaaaaagaaagggaaataagctttcttgtattaagctaacttgtcccagaggcagcaacaggcacagcccagacccaggaaaagtcttgataatattatttattgtattctggagactcttccagcactccttcaatgtagggagaagaaaaacaaattttcctttgttttatggtatgagtttatagattcttgttctctttaactagtaacttcaagtattctgttttatctaagaagtatggcaaaggtcatgagaagcctgagcaggcctgaactacagctctctaggcaccatagtgaagataaaccaatgcaagcctctttagagcaaaacctagataatagacatctgggttgcatagcaacagttatgtgcaatcctgagttatgaacctgttacaatttgattaactgtctttttcctgcctctgtatccctgctttcacaccactgtaagcttgcttcaagctggcccacccccttttgtgaagtgtgtataaaagtcaagtgctgtctttgttccaggccctgtctttggacgtgagtctgctgggcctgagagcactcaataaaagattctcctgttttaacccaaagcctctctctcatcctcctaaatcccacaacaaaaccacaatgagatgctatcttaatcttgctagaagcccataatttaaaagtcagaaaacaatagatgttggcatagatgtggtcaaaagggagcactttgacactgctagtgggaatttaaactagtccgaccactatggtaaacagtatggggattccttaaagaactaaaagtagaccattcattccagcaatcccattactggctatctacccaaaggaaaagaagttattccataaaaaagacacaagaatatggatgtttatagcagccgattcgcaattgcagtgatatgggaccaacttaagtgcccatcaacgaacgagtggataaagcaaatgtggtacaccatggaataatacttgataataaaaaggaacaaaataatgtcctttgcaacaagttggatggaactggaagccattattctaagtgaagtaactgaggaatggcaaatcaaatattgaatgttttcacttttaaatgagagttaagctatgagaatgcaaaggcataagaatgatataatggacttggggactcagggggaaaggttgggagggggatgaggaataaatgatgacatattgggtatattatacactgctcaggagacagatgcctcaaaatctcagaaattaccactaaggaacttttatccacataaccaaaaaccacatatattccacacactattgaaagaaacataaacattattttaaaaaataaagccacttttaaaattagcaaaataaaataaatatgtcttcagagtttagatattggatccaaattagacagatcaaatactgcctttactaaatattttcatgtcattaacaacttctaaaacctttcaaacagttttttgacatgtcttggaaccatccatttctagctaaggcctgggcacctgtgaaatagggccatgcccccccttatactgggaagagtaagatatttcaagactaagatgttttctacagctccatctttttctttaagctctacatcaaggacataattaaaattggttgtctcctaagtggtttactaaaaatgcatacttaagagttaccattataattaatatttgtatctaaagctacttaaaaattttcacacacaaatctgactgaacaagtaaaatatattttaagtcaaagtttataaaaggacatgagaacatagcttttatgaaaaaattagttttgtcaagtttagaggttttcaaatattttaaattcaggaaataaaataacaaaaagacaaaagaaaatggttgaacaacttagaaaaggtttgttaaaattcatcttataaaacaatctacatgtaaaaagtgggctaaaatttgaaagagattatttaggttttccataaattaatccagaaggggtaggaagtcttaagaatgaggaaggacaggaggaaggggaggtcatcctgacactgcagaggcagaagtgcagctgaaggtatgaaggctaagaggggaggggagtttgagtgctgctgcctggctgtcagagcagaggagggtcctgggcaccagacttgaggaagggatgaaaatgctgggcagacctgtagtgggcccttgagatggcagatagtggtttccagagagagggccattgttttccagtgcccagcactgagcagagagagttttgggcagtgtaaaaaaaaaaagagaacttacctctttctcgttttagaaaaagaacagtctaagaatatcagcagggaaactctcagtgcttcaaggggttaaacgcccttttggctttcttgtgttggtttcatcatagaggaggagaaacttcttggaagtgttcctaaaaacacaacacgtctgcttctcctttcaaaaaaggaagtgctaaaacacgaacactctagatccaaatattaatacggatgtctaaatgcttccgttttccaaggggcagaaagctaaaggttgtaacctattcatttcagtcaaagttggtgaaagggaagcaaaggaactgggtggggcttggaaggatgacgaagctcaagctcattggccagcaacctctctcctgggggcgggaggggtgagcatacgtcattgctttggcttctataaaatgaggaggactcaccgagtgtgaagagtccttctggtgattgcagctgagagcacactcacgacgttctgcaaggattctctgattatgattctgaagggaaaagcgatggaatggacagcagagattgtaattttctttatcttgaattacggaagaaagtatctaggacagaaatccacgacaagtccttggaaccagcagatctcttcgttcacggagacgttgacgtattctctattgaagaagattcttaccttcttactggacaaggttttgtcagttctgcgtgactggattgtccgggagactctgaggaaactgatgtcacatgtttttccaaagaagatgtttctggaaccaacaactgtgattgtggtttgaggacttctgagagttccagtacaggaaataagcagaacatcagctggaggctaaacggatccagacttcactcttcacttcccttcctattcagtctattgtgcctgctgactgagaagcttggctggtatgtgagcaaataaacggaactattcagaaggagatgttgacatattctgtattgaagaagatccttatcttctcacctgacaaggttttgtcagttctgtgtgactggattgtccggaagactctgaggaaactgatgtcacatgtttttccaaagaagatgtttctggaaccaacaactgtgattgtggtttgaggacgcctgggagttccggtatgcgaaataagcagaacatcagctggcggctgaagggatgcagcctccactcttcacttcccttgccattccatctattgtgtctgcctgactgagaagcttggctggtatgtgaggaaataaacggaattataaacaaggagattgtttctcatctacttcattctgttgtggcttttctattttggggttcagggtgtgtgacaaggaccaaggagatgaaaggtttcatgatggagaaagcccaggcaatcagattgaagagctatccacagggaatcttggctgctgaggggctgcaccctgcaacggactgaccatatgacagaaaagggttttaaaggctcaacttctggactgagaacccagagtaatttgggaacctcctctgtgaggagatatgaaagctgggaatcatgacatccctaggaatggaaggcacatttcctgatggaaggggtgctttggaaaacaggagcagagtagacacagcagccttgtggatacgggtgggcagcatgcatgggtgatgtgaacgtggagtgtttgtgatcgaaactcaaaatgtctgacaaagtgaaaacctagaaaccacaatgaggaggaagagtttgtgagggcaatcactctccccatgtgtgaaaatcgggggctcttaaaatctcatctggagaggtgcagtctaccaaactctgggactttagcctccccttttaaaaaaccgtgcatcaataccaacgtccgaaaccacagaaataacacctggcttgcatggagacaaggacaaaaagccgtcatgatgagttgttctgctcacttgctgcctctgttcagtgcacaggatattgtccacccactagcaggctactgcaagagaagtgtgcaatatgttccctatgtgccatatatgtgccatatggcccatatgacaactgagtcagaaaatatctgatgccctcagagttacactccacctggagcttgcccccagccatccaggacctaggctccctaccctgtccaattttctggtgttttgggggcttcattctctaaggtgtgcccactctttactcaaaccaaaacacccacatattcctgcccatgaacaaccaatcaaccacttctcagttccacatcctgctgttgggtctctagtggtgacactgtaactcccaggtcatagtggtgacactataacacctagctaaattgatgccttgtctctaggaggccatgggctcctgcaggtctcatctgactctctgtagccttccctgacaatgctcacaatacccaagccagagccacattgacagcaagctgctctcatcttacctttgccagacctggccactggaaaaggctgaccctcatcctgcaatgcctatacctccaacctttgtctcaagctggtgtcctggagggacttctaagcagaaaacagattcagactcccatcctctcctgaatggcctcatatccaattctcagaccctcagccttcattgtaaggacacttcatccatgcccttgagtattctgtctgcactgtgtattctgcaatagattctcctccctctgcgaccctcaactccttccgcagactttttgttttcttgatcatctaccatagtcttccactgggacactgccaagcccattctggagagtgagttgtgcaagtacactgccccccatctacctttcgggaggtgtatacacccttctttctcccaggtctggaggctttctattttcatcctgaggcatctccacctgctcttggattcttcaaattgacaaccaccagttaacaagaactatgtgtcaccaaatagccaaacaatggcaattacaaaaataaaattaatagctgtaacccccattagcaaggatacacaaatcaaatcagggatagtgggtgaggaagtctgcctaacattcaaggaaggattctgaagtgatacaaaatcattgcctttgctatctttagaatggacactttcagccaggcacagttgctcagcctgtaatcccagcactctgagagccccagttgggtggatcacttgaggccagcagcttgagaccaccctgggcaatgtgcagaaaccccaactctactaaaaatacaaaaatagccagttattgtggcacatgcctgtaatcccaactccttgggaggctgaggcacaagaatcacttgaatctgggagccagagtttgtaatgagcgaagatcatgccactgcactctagcctaggcattagagtgataatctgtctgtggaaaataaaaacattcctcttcaaagttttcttctttaaatcataaatgttggaattaatatatcctctttgaaactcactttcttcaagcttctttatttgatggtagtaaatctttgttaagctttatgaggcaagagtaatggaagaagcatattatatatatttatactctaacctcagtgcttgttctagcaagctcaggcatgcgtgaatgtgcccaggcatgttccagcccataccttatatcctttccttattgggaaatgctgttactcctataagcattcttgtaagcaacttcctctttttctttgtctccactatctttacctattgaggacagttttaggttcttagccagttggatgtagcatagactgtgaggtccaaccccagccaatggagatagcacacagcagtagcgacctcatgcttaacagataaatattcctgtctccctttgtttggggtgctctcagctgatgagcaacaccctttctaaagaaattaaagttgtcttgctgagaaaacttttggtctaaatgctgattcttccttgcagcactgaagaagaagcaattatttccaacactttctcatacacaaaaaaagaagaaggtggaagaaaactttcttgtgcaccctatccctcactcagaaagacaacagaaggctcctagtggcaagccctagaggattcatttcttttgggaaccctcttggctgggatactaggactcaggtcaaactcagcattttcagtgtgtgggaagtgtgcttgggtttcactgttacttccaataatgtgatttggtccttggggttcaccaaattttggtatggagtggtgaaccctgttaagtttaagtgtctataaaattaacaaagcaaaataaccattctgccccatggttcagagaccaaatattgtgtaggaaatgctttagcgagagaaacagagaagaataaaaaatgtcctcaagcgctgcattatttcttgttatcgtccagatcttagaggaaaggctttcattttccctcattcagtatgatattagctgtgcatctgtcatttatggcttttattatgttggggtatgttccctgtgtatgtagttttttcagggtttttgttatgaagtgatgttgaactttatcaaacgtttttcagtttcagttgaaacgatcatatgctttttgtccttcattctcttgatatgatgcatcatgttgatgatttccatatggtgcactgtccttgcatcctgggcatgaattccacttgatcatgacaaatgaatttttaatgcattcttgaattccgtttgctggtattttgttgaggatttttgcatcaatattcatcagagatattggcctgcagtttctttttttttcttttttctttgttttgttgtttgtttgtttgtttgttttgatgtgtctatgtctggttttggtatctgggtagtagtgttccatccccttttattttttagaataatttgaataagactggtgttggttctttaaatatttggtagaattccgaagtgaagtcattgggccccgggcttttctttagtggaaggctgtttattatggcttcaatctcgttacttattattggtctattcatgttttgaatttgttccttatttaatcttggtaggctgtgtgtatctaggaatttgtccatttcttttagattttcaaatttattggcacataattgcccattgtagcctctaatcgtcatttgagttcctgcagtaccaattataatgtctccttcttcatttttgattgtatttatttggatcctgcccctttttttcttacttaggctgcctaataatttcttaattttgttgaactttttcttttgtttgtctcgctctgccaccaggctggagtgtagtggtgtgatcttggctcactggaacctccgtctcccaggttcaagcaattctcctgcctcaccctcccaaatagctgggactacaggcaagtgccaccactcccagctaatttttgtatttttagtagacacgggttttcaccatgttggccaggatggtctcgatctcttgacttcataatccacctgcctcagcctcccaaagtgctgggattacaggcatgagccactgcgcccagcctaattttgtttaaattttcaagaaatcaacttcttctttcattgatttctgtattttttatttccattttatttatttaaactctaagctttattctatcttcttctcattttagctttggtatgcttattgcctctctagctctttaatgtgcattgttagattgtttatttgaagttcttcctctctacaccataagacgtaagcatgtcctcattatgtcataagatgtaaccacttacagctataaacttccttcttagttctgcttttgctgtatctcataggctttgttatgttgtgtttccattatcaattgtgtcagaaatttttcaatatttttcttaatttcttcattgagcaactgatcatttgggagcatatttttaaacttccatgtacttacatagtttccaaaatacctcttgtgatcaatttctagttttattccactatggttcaagaagatgcttgatattatttcaattttttttcacattttaagatgtgttttgtgacctaacatatggtctactttttttttttattaaactttaagttgtggggtacatgtgtagaccgtgcagttttgttacataggtatacacgtgccatggtggtttgctgctcccattaacctgtcatctacattaggtacttctcataatgctatccctcccctaacctccaccctctgacaggacctggtgtgtgatgttcccctccctgtgtccatgtgatctatttttgagaatgatccatgtggattagaatgctgtggaaaagactttggattcctaatatccagggagggagacgatgatattactttcaatatcacacgggtgtacacactctctgtgacattgttcctaatatccagtggaagagaggatgatataacacccagggagggagaggatgatattactcttaatattgcagggtgtgtacccatgcctatgatattgttcctaatatcaggagggggagaggatgatattactcagaatatggcagggggtgtacacacactctgtgacatggttcttaatatacaggggagaatgggacaatattactctcaatatcgcagggggcgtacaaccctgtgatttgttcctaatatacaaaaggggacagtatgatattgttcctaaaatcgcagaaggtgtacaacgccctgtgatattgttcctaatatccagggcgggagaggatgatattacccccaatatcacagggggtgtgcactttccctgttacattgttcctatgatccgagtggggggaaatgacattagtcccaatatcgcaggatgtgtacactactcccccatgatattgttcctaatatcaagggggagagaggaggatattactcccaatatcgcaagggaggtacatcctccatgcaatattgttcgtaatattcaggaggagagaggaagatattactctcaatatcgcagaaagtggacacccaccctgtgatgttcttcataatatccagggaagcagacgattatatgactttcaatatcgctgggagtgtacatcccttttgggatattgtttctaatatccaggaagggagaggattatattacttccagtattgcagccagtgtacacatttcttgtgatattgttcctaatatccagaaagggaaaggatgatattactcccaatattgcaggtggtgtacacccccctctgatattgttccttacatcaaggaaaagaaagaagaatattactcccaatatcgaagagagtgtacacccctcctgtgatattgtatttaatatccatggggaaagaggatgttgttactcccaatatcgcagggggtttacacccacactgtgatattgttcctaaaatccagtgaaggagaaaataatattgctcccaatattgcagggtgtatacaggccctcccccgttatattgctcctaatatccagcggtggagaggatattactttcaatttttgcagggagtgtgtaccccctctctgatatttttctaatatcaaggatgggaaaggatgccattactcccaatatcgcaggaggtgtacatgccctgtgatattgttcctaatatccagggaggtagaggatgatattactttcaatattgcaggggctgtacaccctctatgatgttgttattaatatttaggttgggagaaaatgatatttttcctaatatcctgggaaggaaaggatgatattactgtaaatattccagggagtgtacaccttcctaatattctaatattgttcctaatatccaggggtgggagaggattatattactcccaatatcgcagtgggtgtacacccctcctgtgatgttgtttctaatatccaagcgaggagaaaatgatatcactctcaataccgcagggggtgtacaccttccccatcatatcgttcctaatattcagagggaaagaagatgatgttactttcaatatcgcaggggttgtacacaacccctgtgatatttctcctaatatccaggaagaaagaggatgatattgctcccattatagcagacggtatacgcctccctgtaacattgtttctaatatcaagactgggagaggatgatatcacttccagtatcgcaaggggtgtacacctcccccgtgatattgttactaatatccagggggaagaggataatattactttcaatattgcaggggctgtacacccccgtgatattgttgttaatatttaggttgggagaaaatgatattagtccaaatatcgcagagagtgtacacacttccgataatattgttcttaatatccatgggggagacgatgatattacacccaatatcgcagggggtgtagtctccccttgtgatattgtccctaatattcagggaagtaaacgatgatgttagtgtgaatattccagggagtgtacaccccctttgtgatattgtcctaatatccgcaggagagaagataatattactcccaatatcgcagggggtgaacacaccccctgtgatattgtttctaatatccaagcgaggagaaaataatattactcccaatgtctcaggggatatacaccttccctatgatattgtttctaatattcaggtggaaaacgggtgatattactcctaatatccaggaagaaaggggattatgttactccccttatagcagggggtatacacctcccctgtaatattgttcctaatatcaaggctgggatatacgtggggggaaggatgatattactcccaatatcacaggggttataaaaccttctgtgatattgctcctaataaccatggcggaagaagatgatattactcctaatattgcaggaggtgtacactcccccattatgttgttcctagtatgcagaaaaggagaggatgacattattgccaatatcgcagggtgtgtacaccacccatgatattgttcctaatatttagagggacagaggatgatattactcccaatatcgcagggggtgtacacgcatcccctgtgatattgttcttgaaatcgaggggaaagagaattatatttctctaaatattgcagagggtgtacaccgccccctgtgatattgttcctaatagccgggggcggggggagataattaaattactttcaatatctcagagagtgtacatcccccttgtgacattgttcctaatatccagagcaaaagagaatgatattcctcccagtatcgcaggaagtgtacatttaacctgtaatattgtttctaatatccagggggaagagaatagtaatactcccaatatcgtaggggttgtacaccttttctgtgatattgttgcaaatatttagaagagagagagaatattactcgcaatatcacagggaatgtatacttcccctgtgatattgttctaatatctagaaaaagagaggataatattactcctaatattgcagggggtgtacacccccacttgtgatattgttcctaatataaaggaaggtcgaaaaacaaacggggagcccagggggaaggaaggcaggcgaggaagaggcagcgccggggcgccggagggagcagccgggccgcggaagcgcgagcacgagaccggtcgcggtcgcagtcgcatttttgccgttgtcgcggccgccgccgccgaggcttacccggggatgtctgagcccgcgcctcgcggcccccaagctccacgctgcgcccgctgtcccggcctctaagggccgccacgtccctgcggcgcgcgcaggcagaaagcggcttcgtgccggcggagggggcccgggcgggccgggaaaggctgccccaggccccgcgcctaccccatcaccgcggccggcgccgggccgggaggatgagcggtgtggggctctgaagcatggagggggttttgtacaagtggaccaactatctcacaggttggcagcctcgttggtttgttttagataatggaatcttatcctattatgattcacaagatgatgtttgcaaagggagcaaaggaagcataaagatggcagtttgtgaaattaaaggtgacagctttggaggggaccacccttgattggatacataaattctgttcattcagcagacaacacaagaatggaattaatcattcctggagagcagcatttctacatgaaggcagtgaacgcagctgaaagacagaggtggctggtcgctctggggagctccaaagcatgtttgactgatacaaggactaaaaacgaaaaagaaagaagtgaaaccagtgaatcgctgaaaaccaaaatgtctgaacttcgcctctactgtgacctcttaatgcagcaagttcatacgatacaggaatttgttcaccacgatgagaatcattcatctcctagtgcagagaacatcaatgaagcctcttctctgcttagtgccacgtgtaacacgttcatcacaacgcttgaggaatgtgtgaagatagccaatgccaggtttaaacctgagatgtttcaacggcaccatccggatcccttagtttctcctgtgtcaccttctcctgttcaaatgaggaagcgttctgtcagccaccctggttcttgcaccagggaggagtagccactgtataaaagaaccagtatctgcacttcaccgactctcccagcgacgccgaagaacctactcagatacagattcttgtagtgatattcctcttgaagacccagatagacctgttcactgttcaaaaaatacacttaatggagatttggcatcagcaaccattcctgaagaaagcagacttatggccaaaaaacaatctgaatcagaagatactcttccatccttctcttcctgaagaaactgtagtgtccaactttctctaagtattgctatgcaaaagctgctgtaattgaactattgttatagggagtagttttttcccttaggactctgcactttatagaatattgtaaaacagacaaacaagaaaacaaaccacatacttttgaagcgtgttttatctttatatagtttgtttgcaagagtattttcctaataacttcacagtatgaatgtgcatcttttttttctttttttaacaaatgatggtgtaacattttgacatccataaggacaaatgtagatatttttctaaaaaaccgtgaggggactgacagcttggtcagggtgtattgtagcttataaacatgaaatcttacaaggtttcagtttgacagaagtgtgatatatgtaacttgtgccatggaccaaatggtcactttaccacagctaaaaatgagttatgatagcagcttgatggtgattgcattgtattcctttaatcaaaaaggaaacgcaatattctaagtatctttagcccaaataccatgacatattgagcatctttaaataaccagactgtattgtccttcatatgtgaagttgacactactgatttgtcaataccaaattttgggttaaagtgtttaatttttatttatttattttcttgttgcctcaaaagatgattgcattctaacttttgtgacctaccaaatttaagatgtgtatacattgttctttacgttgttctagaaaagagattttaatgctgtagtgacttagctcacttacatcagagaaataaacaactttcaatggaaaaaaatatatataaaggaaggaagaggatgatattacttctcatatagaaggggttgtacaccccccttgtgatattgttcctaatattcagggagggagaggattatattactcccaatatagcagggagtgtacacccccccccccgtgataatgttcctaatattcagggaagcagaggatgatattactttcaatatcacagggggtgtgctgtccccctgttatattgttcttaatattcaggggggagaggatattattatgcccgatatcacaggagaagtacaccccacaagtgatattgttcctaatatccaggggtaaagaggatgatatcgcaggtggtgtacacccctccccgtgatattgtttctaatataaagaaggagagagcatgatattactcccaatatcgctggaggtctacaccccccttgtgatactgttcctaatatccaggaagggaaacaatgatattgctgtgaatattccagggggtgtacacccctttgtaatattgttcctcatatccagggggtagagaggatgatattactcccaatatcgcagggggtgcacggccccactgtgatattgtttttcatatccaggaggggagaggatgacattactctcaatatggcagggggcgaacaccccctgtgatattgtgctagttaggttgggagaaaatgatattactcccaatatcgcagggggtgtacaccgctcctgtgatattgttcctaatatccatgacgggagaggatattactcccaatatcgcagggggtgtacctctcccctgtgggattgttcacagtatccaaaagggaagaggatgatgttactcccaatatcacagggagtgtacaccaccattgtgatattgttcctaatagccagggaagaaaacgatgatattattgtgaatattacagggggtgtacacaccccctgtgatatggtttttaatatacaggttggaaaaggatgatattactcccaatatcacaaaaggtgtacacacccccccatgatattgttcttaatacttcggtggggagaaaatgatattagtctccatatcacaggggtgtgaactcctccggtgatattgtttttaatatcaagaggggaggagatgatattgctttcaatatcgctgggggtgtacatccctcctgtgatattgttccttatatccaggcgaggggaaaataatattactcccaatagtacacaccccatgtggtattgttcctaatactcagggggaaagaagataatattactttcaatatcacagggtttgtacacctttcctgtggtatagttttcaatatccagggggaaggtacatgatattactcccattgcagcaaggggtgtacacacctcctgtgatattgttcctaatatccagaagtggtgaggatgatattactcccagggggtgtacaccccacctatgatattgtttctaatatccaggggaaaagagtgtgatattatgcccaatatcgcagagggtgtacacttatcctgggatattgtttctagtatttggggagggaggagaggatgctattattctcaatatcgcagaaattgtacacccccgctgtgatattcttcataataatcagggaaaaagaggatgatattactaccaatattgcagggggttacacttcccctttggtagtgttcctaatatccaggaagaaagaggatgatattaatcccattttccaggaagtgtacacccaccgtgtcatgttgttcctaatatccagcagggaagaggatgatattactcccaatatcggagagggtgtacacttcccctgttatattgtttctaatacccagggggaagaaggatgacattactgccaatatcacagggtgtgtaccccaccctgctattgttcctaatattcaaaaggaaagatgaaaatattactcccaatatctcagggtgtgtacacctctcctgtgatatcgttcctaatatccacaggaagagagaatattactctcaatattgcaggggggtgtacacccccctgtgatattgttccaaatattcgggcggggagaggatgatattagtcccaatatcgcagggggtgtgcaccaacctgtgatattgttcctaatatccatgcgggggaggacgatatcactctcaatgtcgcaggaagtgtacacctctcttgttatatttttcttaatatccaggagggaaaagatgatattactgccaatatcgcagggtgtgtccaccccccttttatattgttcctaatatccaatggaaaagaggatgacattgctctccatatcccagaaggtgtacaacgcccctgtaatattgttcctaatattttgggggaagagaggatgatataacttataatatcacaggaggtgtacaccacccctatgtattgttcctaatatcctttaagggagaggatgatattactcccaatatctcaggtggtgcctattccccctgtgatattgtttttaatatccaggggaagagagtatgatattacgcccaatatcgcagggggcatacaccctctctgagatattgttcataatatatagagggagagaggatgatattacttccaatatcagaggtggggtacaccccccggttatattattcttgatatccaggaggggagaggttgatattactggatatatagcagggagtgttcacatcttctgtgatactgttcctaatatccagaaaagtagaggatgatattactcccaatatcgcagaacgtgtacacctccctgtgatattgatcctaacattcaaaggggagaggatgatattactcaaaacatcacagggcatgtacactcccctgtgatattgttcctagtatccagaagggagcaagataatattactttcaatatcgcagggggtgtacacccctctttggtatgtttcctaatatccagaaggaaagagggtgctattactttccatattgcaaggggtgtacacccccctgtggtatggttcataatatccagggagggaaagggtgctattattccccatatcgcgaggcatgtacaccctgctgcggtacggttcctaatatccagggggaaagaggatgctattacttcccatatcgcggggtgtgtacacccccgtgtggtatgttttgtaatctccgggaacgaagagggtgttattacccctcatatcgctggaaatgtacactcccctgtggtacggttcacaatatccaggggattgagggtgctattactccccatatcgcggggggagtgcacctccctgtggtatggttcgaaatatccagggtaagagagggtgctattattccccattttgcaggaggcgtacacccctctatggtatgttttgtaatatcccaggtaaggggtgctattgagagaagagagcaaaagaccccccccatattgttctgtattattttatactcagtacctgttttaagaagaaacaaggaagcgaaaccaaaggcaggcagcccggcgccaggcaccagatccaaaaccagacccgaaaccaggcctgggccttcctgaccttagcctgaaagttaaaattcaacccatgacctagcaactgatgttatccatagattccagacattgtatggaaggacattgtgaaatttcttgttctgttctgtttcactctgagtactggtgcatgcagcccttgtcacatacccactagattgctcaatcaatcatggccctttcatgtaaaaaccttagtgttgtgagcccttaaaaaggacagaaattgtgcactcaacaagcttggattttgatactctagtctgctgatgcttccagctgattaaaagccacttccttcactacctcggtgtctgtgggattttgtccgcggctcctcctgctacactgtgactccccttatagagaggggtgtacacccccctttggttcctaatatccagcgggggagtaggtgctattactccccatattgcggggagtgtacacccccttgtagtacggatcgtaaaatcaaggagggagagaaggtgtaattatccccatatcacagggagtgtacacccctttgtggtatagtttgtaatatccacgacgggagagaatgctattactccccatatcgtggagggtgtacaccgccctgtagtatggttcgtaatatccggaaggggagaggttgctattactccccatatggtgggaagtgtacacccccatgtgatatggttcataatatccaggggggtagaggatgatattacccacaatatcatagaaggtgcacacccttttgtgatattgtccataaaatccagaaggggagaggatgatattacttccaatatcacagggggtgtgtagccccatatgatattgtttgtaatatcaaggtagggagaggatgctattccttacaatagctcaaggggtgtaaccttcttgtgatattgtttgtaatatccagaaggggagaagataatttttttattttaaaagtaaactttaatgtcaaaaatgcaaacttgagaagggcagaaagatcaaacagaaggctgccacttcacaattggagggttgcacagtggccgggcagaggcgctcctcactccccagacggtgaggcagccgggcagaggtgctcctcacttccgagatgttgcaggagccgggcagaggtgctcctcacttcccagaacagggggctgccgggcagaggtgctcctcactgcccagacggtttgcaggcctggcagaggcactcctcacttcccaaacggagcagcggcaagccagaggcgctccacacttcccagatggtggggcagccgggcagaggcgatcctcacttctcagagggtagggcggcccagcagaggcgctcctcacttcccacatggtggggcggcaggctagaggcgatcctcacttcccagacggtggtgtggccatgcagaggtgctcctcacttcccagatggtgtggccgccgagctgaggcactcctcacttccctgacagtggggcggctgggcagaggcgctcctcacttcccagacacttggactccgggcagagactctcctcatttcccagatggtggggctgccgggcagaggcgctcctcacttcccagacggttcagaggccgggcagaggcgctctggggagaggataatgttactcccaatatcgcagggggtgcacactccctgtgatattgttccgaatatccagagggggaaaggatgatatagctcccaaaatcgtggggagtgtacacccccctgtgatcttgtttgtaataccaagaagaaaagagaatgctattatttccaatatagcagggggagtacaaccccctgtgatattgttcgtaatatctagggggagagaaaattatattagtcttaatatctcaggggacgttcatccccctgtaatattgttggtaatattcagaatggagaagatgatattgttcttaaaatacaggaaaaaatatgataatattacttccaatatcgaagggggtgtacactctcctgtgatattgttcccaatatccagaatgaaagaggatgctattactcccaatatcccagggagtgtacacccctttgccatattgttcataatatccaggggaagacaggataacattactcccaatatcaccgggggtgtccacccactagtgatatttattgttcatcatatccagaaaaggagaggatgatattactcccaatattgcaggtggtgtacggtccctgtgatattctttgaaatatctagaaaaggagaggatgatatcactccgagtatcacagggggtgtacacccccctgtgatattgttcgtaatatccaggggagaaaaggatgatataattgccaatatttcaggggatgtgcacctccctgtgatattgtttgtaatatccaggggtggagaggatgatattactcaaaataacgtaaacatcctgtgtgtacatcccctgtgatattgtttataatatccaggggggtagaagatgacattacccccaatatcacagagtgtacacacccctgggatactgttcataatatccaggcgggaaagaatgaactacttccaatatcgcaggatatgtacacccccctgtgatatatttcctaatatttatgtgggtaaggatattacccccaatatcacagaaggtgtacatcctctttgtgatattattcctaacatccaggaaaggagagaatgatattactcccagtatcgcagggggtgtacaccacccctgtgatattgttgctaatatccagggggagaggataatattactcccaaaatcacaggggacgtacactcctcctgagatattgttcctaatattcatggggaaaagaatgctactactccaaatacagcagagggtgtacaccatccccgtgatattgttttttatatccaaagggtgaaaggctgatattactcccaatatcgcagggggtgtacaggccccccatgatatcattcttaatatccagggaggcaaagaatgatgttactcccaatattgcaggctgtatacaccccccgtgatattgttcctaatatccagagtaagagaggatgacattgctcccaatattgcaggggttgcacgcacgccctgtgataatattactcccaatatcaacagtgggtgtacactcctcctgtgatattgtttgttatatctaagaaagaagaggatgatattactgtcaatatcacagaaggtgtacagccccttgtgatgttgtttctaatatccagcggtgagaggatggtattactcgcaatattgtagggggtgtccaacggccctgtgatattgtttctcatattcaaaaaggaaaagaataatataactccaaatatcgcagggtgtgtacacttccctgtgatattgatcctaatatccaggaagagagaggatgatattaatcccaatatcacagggggtgtacatcgcttctgtgatattcttcctaatatccagggggggaggggatgctattactcttaaaatcgcagggaacttacactcccactatgatatttttcctaatatccaggaagggagaaaatgatattactcctaatatcacatatcacaatgggtgtacatctccccgtgatattgtttctaatatcaaggatgggagaaaattatattactctcaatatcgcagggggtgtgcacacctcctgtgatattgttcctagtatccagcggaggagatgatattactttaaatattgtagaaggtgtacaacccccctttgatattgttcctaatatccagggggaaaggagatgatattactcctaatatcgcaggggctgtacaaccctatgtgatattgtttcttctaatatccaggggtggagaagataatattactcctaaaatcgaaggggacatacactccccctgtgatatttttcctaatatccagaaggaaagaggatgatattactcctaatattacaagaaatgtatacctgtcctgtgatattgttcctaatatccagaggggtaaatgattatattactcccaatatcgcaggggtgtacaccttccctgagatattgtttctaatatgcagtggaggagaggatggtattactcccaacatcacaggagatgtaaactccccttgtgatattcttcctaatgttcaggacgaaggagggtaatattactcactgtattgcagcagggggtgtagagccccctgtgatattgtttttaatattcaaggttggagaaaataatattccttccaatatcgcatggggtgtacacccttctttttatatagtttctaatatctggggggagaggatgatattactcccaatatcgcagggggattacacccccactgtgatattgtttttaatatccagggtgggagaggataatattactccaaatatcccagggctatacaccctccgtgtgatattgtttctaatatccagaggaagagaagatgatattactcccaatgtcacagggtgtgtacaggccttctttgatattgttcttaatatccatgagggagaggatgatattactcccaatatcgcaaagactgtacaccctttctgtgatattgcttccaatatccagggagggagaggatattacactcaggatcacagggggtgtacaccccaacctgtgatattgtttctaatatctagggaaaatgagggtgatattactatcaatatcacaggaggtgtacactcccttatgatattgttcctaatatccaggagaatgacaggataatattactcccaatatcgcgggtggtgtctccccccactccgtgatattgttcctaatacccagagggggagagaatcatattactcccaatatcgcaggggatgtacacctacatccggcggagtagaagataatattactcacaatatcgcaagaagtgttcaccttccctgttatattgttgctaatatccagggagtgagaagatgatattactttcaatactgagcgtgtacactacccctgtgatattgtttctcatatccagtagaggagaaaatcatgttactcccaatattgcaggggtgaacacctcctttgtgatatttttcctaatatcaggaaagggagagtatgatattacccttaatattgacaggggtgtacacccccctttgatattgttccaatatccaggggggcagaggataatattattcccaatatcgcagagggtgtacaccccccgtgatattgttcctaatatccagagaaataaaaaatagtattatttccaatatcacagggcgtacattttccctgtaattttgttcctaatatctggggggtggggtggcaggataatattactctcaatattggagagggtgtacacccccctgtgatattgttcctaatattcagggtgggagagaatgatgttactcccaatatctcaggagtcgtatacacccccttgtgatattttttctaatatccaggaggcagaggatgatattgctcccaatatcgcagggggtatacacccgagctgtgatattgtttctaatatgcaatatgggggaaggatgattttactttcaatatcgcagggaatgtacactttccttgtgattttgttcctaatatccaggggtggagaagatgctattactatattactcctcatatcgcaggcggtgtacaactccctgtgatatggttcagaatatccagagtgaaaaaggagggtgacattactcccaatatcgggggggtgtacacccctttgtgatgtggttggtaatatccaggggggcagatgagggtgatatcactccccatatcgtggaaggcgtccacttttttgtgatgtggttctttatatcccgaggggagaaggtgatattactccccatatcgcgaagggcatacacccccctgtgatatagctcataatattccggagagtggaggaagatactatgccctatatcgcgggtggcctacaaccccctatggtttggcttataatatccaggggggagagggtaatattgctccccatattgtggagacgtacagccccctgtgatatggtttgtaatatctttggggggcgagggtgatattactccccatatcgcggggagcatacacccccgtgatctggttcatagtatctcaaaggaagaagttgatgtgtacaacttaagggaaaaagttgaagtgaagtgtacacacgccctgtgacgtggttcataatatccaggcgggggagaggagagtgatatttactccccatatcgcgggtgttgtaaactcccctgtgatatagttcataatatccaggggagagaggagggtgatattgctcctcatatcgcgaagggtgtacaaccccctgtgatatggttcataatatccagaagggtagaggacgatgatattactccacatatcttgggaggtgtgatatggttcgtaatatccagcgatgagagaatgatattactccccatatcgcaaaaggtgtgatagggtttgtaatatcctgagggggagagggtgatattaatccctatattgcagaaggactacaccctcccatgacatggtttgtaatatcccagggggtagagtgtgatattactttccatatcacagggggtgtgatatgattcgtaatattcgaagggggagagggtgacactactctccatatcacggggtgtgtgatatggttcttaatatcccaggggttagaggttgatattaccccctttttggggggtgtgtacaccccctgtgatatggttcgtaatatcccgggggagacagggtgacattattccccatatcgaggggatcgtacaccccctgtggtgtggttcataatatccctagggggagatggtgatattactccccatatcagggggcgtgcactcttctgtggtataattagtaatatccagggggcagaggtcgatattcgtttccatatcatgaagggagtacacttccctgtgatatggttcctaatatccaggggggagagggtgatattattccccatattgcggggggacatacaacccctgtgatatggttcataataaccagaaaagaagagggtgatattaatccccgtattgcagagggcatacaccccccctgtgatatggtttgtaatatctaggggaggaaaaggtgatattactttccatattgctgggtgcagacacccctttatgatatggttcataatatccaagttggagagggtgatattacttcccatatcatgggaggtatacccttccctgtgatatggttcgtaatatccagaaggggagagattgatattactccccatattgtggggggcgtacaccttcctgtgatacggtttgtaatatctaggggatatagtgggtgatattactcaccatatcacgggggttgtaacatggtttgtaatatccaggggaggagagggtaatgttactccccatatctcggggcatgtacaccctcctgtgacatggttcgtaatatccaggtcgggagagggtgatattactcctcatattgccgggggtgtgttatggttcataatatcctggggaaggaggctgctatcactctccacatcttgggggatgtacactctcctgtgatatggttcataatatccagggtgggtgagggtaatattactccccatatcgcgggaagtgtacatacccctgtaatattgtttgtaatagaagagagggtgatattactccccacatcgcgggtggtgcccacccccctgtgatatggtttggaatatccagggggatgaggagggtgatattactccccatatctcggtgggagtacatccctctttgatcaagttcataatatccaaaaggaaacaggagagtgatattactccccatatcgccgggggtgtacacgggagggggagtacacccccggcgatatggtctgtaatatccagggaaggagaggagggtgatattactcaccatatcgcaggtggtctacatttacctgtgaaacagtttgtaatatccagggggggaaatgagaatgattttttttttttgagtctcactgtgtcacccaggttggagtgcagtggcacgatcttggctcactgcaacccccgcctcctggactcaagcaattctcctctcccagcctcctgaatagctgggactacaggcgcaccccacaacgtctggctaatttttgtatttttattagagacggggtttcaccatattggccaggctgatctcgaactcctgaccctgtgatccatccgcctcggcctccaaaagtgctgagattacagatgtgagccaccacgcatggcccaaggagaacgatattactccccatatcccagggggtgtatatccccctgtgatatggttcagaatatccggaaggaaagacagggatattacttcccatatcgcaaggggtgtgacatggttcgtaatatcccatgggggagagggtaatattactcttcgtattgtgaagggcatacactcccctgtgatacagttcataatattccggggagtagaggaagatattatgctccatatcgcgggtggcataagccccctgtggtttggttcataatatccagggaggagagggtaatattactccccatattgtggggacgtacaccctcctgtgatatggtttgtaatatcccagaggggagagagtgatattactccccatattgcagggacatacacccccctgtgatatggttcaaaatgtcttttttttttgaaggactggttctttatttcaaaaagacacttgtcaatattcattatcaaaacagttgcactattgatttctctttctcccaatcggccccaagtagaccacatcaaaggagagtacatattaagccaataagctgtaggatgtacacctaacagacctcctagaaaccttaccagaaaatggggacagggtagggaaagaaactttaaaagatcaacaaactgccagcccacggactgcaggggctgtcacagccagatggggtggccagggtgccacaaacccaaagaagcaaagtttcaaaataatataaaatttaaaaagttttgtacataagctattcaagatttctccagcactgactgatacaaagcacaatgagatggcacttgtagagacagcagcttcaaactcagaaaagggtaatgagatgagtttcacatggctaaatcagtggcaaaaacacaatcttctttctttctttctttctttcaaggaggcaagaaaagcaattaagtgctcacctcaacataaggggaacatgatccattctgtaagcagttgggagggggtagagatggaacaaaattttggtctcagaggtcttgccatcttaatttggtcacttctaatgaaaaaaataaaaaatagaaataacattatccaaaggtatcttaaagctgaaaacttgaacagcacattttttgttgttgttgtttggctaactcctcctggaaccacctttctggcttagctagtactttgtacagagcaatgaggcttcccatagtggagtctccctgggctctgtttggctctcagcaaggcaggcctataccttttcctctcctccatggagagaggaatatgcattaaggtgaaaaatcaccttccaaaagtgagaaagggattcgatcgctgcttcagggctgtggtattatatggaatgttttacaaaaggttgctacaaaacaacaaaagaggtaattacaaaatgtgtacatcacaacatactttttaaagacattatgcattgtgctcacattcccttaaatgttgtttccaaaggtgctcagcctctagcccagctggaatctccgggaagaggcggacagtttggtgaaaaagacacagggaaggagcgggcggcggaaggagggggcggcgaaaggagaaagcagccttccagttaaagatcagccctcaattaaaggtcagcttcgggcaggctggcctcaggcggagtctggttcagagggaggagcagcagcagggtgagactgaggcgttctacatctcattcaggtcaagcagagtctggtccagcatcctttgtgtacagaggtgctcccctttggtgcatttcagtttatcttccaagtcatcaattgtcttttccagcttggctaccgatctctcagcaaactcagcatgggtctccgcctcctttattttatcagtaagaatcttgatctcttcctcatatttgtcttctttttgagagtacttttcttcagcagcactcagacacttcaggttctggtccatcagtctaatctgctcatccatctctcggcaaagggattctgccagctcagctcgttcctctgtgcgttccaagtctccttcaatgatcaccaacttacgagccacctcttcatacttcctatctgcctcttctgcaatgtgcttagcttctctgagttggatttcctggagttccatcttttcttcatcttttaaggcccggttttcaataaccttcttacctctctcactctcatcagcagctttttccgcttcttccagcttttgcagggcagtagccaggtgctcctgagcacggtccagctcctcttcaaccagctggatcccacgttcaaggaggccacctcagcctcagcctgttcccgggcccacctttctccctcaacttctcgctggaggcgctcagctcgctcctctgcatcatctgcctgctgctgcagaacctggatcttgcgcttcaccgcctcgatggtggtgatcccagccatggtgcccacccagctactgctagagctccggttcctgcctcctccgatcggcgttgcagcctcctctcacccttacttccgcctcggttcaaaatatcttaagggaaggagttgatattactccccacatcacgggaagtttacatcccctggtgatatggtttgtaatatcccagggtggatagggtgatattactctccatatcgcgaaggagtactcccccctgtgatatggttcataatatccttggggggagagtgtgatattactccccatatcgcgagggccatatactcctttgtgacatggttcgaaatatcccggtgggggagggggtagagggtaatattactccccatacagcgaagagcatacgcccttctgtggcaaggttagtaatacttcagggaaaagagtgcaatattacttttcatattgcagggaacatacactcccctgtgacatggttcgtaatatcccgggggctgagagggtgatatttctccccatatcaccgggggcctacacctgggtgtgatatggctcataatatacagggagggagagggtgatattactccacataccgagtgaggggttacacaccctcgtgacatgttcgaaataccccaaggaggagacaatgatattactttccctgtcgcgggggctacaccctcccagtgatatggttcacaatatcccggggtggagagggtgatattactccctatatcaccggggggtgtacacttccctgggaaatggtttacagtatccccggggggagagggtactattactccccatatcacgttacatatcagggtacacccccacgtgatatggtttgtaacatcccaggaggaagaaaatgatattactccccatatcgcggtggcatacacccctccccgttaaatggttcataatatcttggggtggagagggtgatattactccccatatcacgtggggcatacaccccactatgatatggttcataatatcccggaggggagagggagatattactctccatgtcgcggggggcatatacacccctgtgatatggtttgtgatatcccgggggcggagagggagatattactctccatatcgtggggtcgtacacttttctgtgatatgattcgtaatatccagacggggagagggtgatattacttcccatattgcgggggcgtacacccctctgtgatatggttcataatatcccgaagaaaagagggtgatattactcctcatatcgcggggaacacacaccaccctgtgatatggtttgtaatattcagcgggggagagagtaatattactccctgtatctcggatggcgtacactcccctgtgatatggttcataatatccagaagaaaagagggtgatattactccccatattccagggaatgtacaccaccctttgaatatggttcgtaatatccaggaggggagagggtaatattgctcccaatatcgaaggaggtgttatacggttagtaatatccagagaaggagagggtgacattactccccacatcgtggtgggtgtgcacccacctgtgatatggttcataatattcaggttaagagaggtgatattgctttccatatcgccaagggtgtacactcccgtgaaatacagttcgtaatatccaaaaggggagagggtgatattactcccatatcgtggggggtgtacacccctctgtgatatggttcataatatccagggtggaataaggtggtattactccctgtatctcggggcatgtacatcgcctgtgatatgattcataatatccagaagaagagagggtgatattaatctccatattgctgggggtgtacaaccccctgttgtatggtttgttacactgagttggggagagggttacattactctcaatatcgagtggggcatacacacttatgtgatatggttcataatatcccagggaggagagggtgatattactccccatatcgcgggaggcatacaccccaatgtgatatggtttgtaatatctacatttttttttttgagacgaagtctcgctcttgtcccccaggctggagtatgatggccggatctcggctcactgcaacctcagcctcccgggttcaagcgattctcctgccttggtcccccaagaagttgggattacaggcgcacaccaccacgcccggctactttttgtatttttagtagagaaggggtttcaccatgttggccaggctggtctagaactcctgacctcagatgatccacctgcctcggcctcccaaagtgctgggattacaggcgtgagccactgcacctggcctggtttgtaatatctatgaagggggaaggtgatattactttccatatcacgggaggcgtacaccacgatgtgatatggtttgtaatatccagggggtatactgggtgatattactccccatatcgcggggagtgtatacccttttgtgatatggttcctaatattaagctgaggagaaggtaatattactccccatatcgcaggggtttttatatggttcataatattcaggaagagagagggtgacattactctccatatcacggggtgtgtactcccccatgtgatatggtttgtaatatccagggaaggagaggttaatattactccccatatcgcagggggtgtacacctctctgtggtttgtaatatccaaagggaagaggatgatattatcttcaatatcttggggggatacagtccccagtgatattgttcataatatccagagggggaggggatgatattactcccaatattgcaggtggtgtacaaccccctgtgatattctttataatatagagggggatgatgatattactcccaatatagtaaacaacctgtgtgtacaccccctgtgatattgtttataatatccaagggtggaaaggatgatattactcctcatatcgcagggggtgtatacccctctgtgacattgttcctaatattcaggggaggagaagatgatactactcctcatatcacaggggatgtacacccccctgtgatacttttggtaatatccaggggaggagaaaattatattattccccatgtcacagagggtgtacaccccgctgtgatagtgttcataatatccaggtgaaaagaggatgatattactccgaatatctcaggaagtgtacacccttctgtgatattgttcataatatccaaaggtggagaggaggatactactccccatatcgcagtgggtgtacacccccctgtgatatggttcataatatccaatgtaggagaggatgatattactttccatatcgcggagagtgtacatccccctgttatattgtttgtaatattcagggagaaagaggatactactactccccatatcacacggggtgtatattcccctgtgatatggttcctgatatccaagagatattataatcctctcttggattatgctacctctcatatcgcatggggtgtacacacactttgtgatatcgtttgtcatatccaaggagggagaggattatattaatcccaagatcacggggggtgtacaccctcctgtgatattgtttgtaatattaaggggggagaggataatattactcccaatataattaacaccctgtgtgtactcctccttgtaatattgttcataatatccaatgggggagacgatgatattactttcaatatcgcagaggatgtacatccctttgtaacaatgtttgtaatataaaaggcaagagaggatgatactacttccaaaattgcaggacatgtacaccccccggtgatattgttcctaatatccagtggggaagaggatgatagtagtcccaatatcgcaaagggtgtacacaccccctgggatattgttcctaatataaaaggaggagaggatgctattattcccaatatcacagaaggtgtaaaatcccctgtgatattgttcgtaatattcaggaggggagaggattatattactcccaatatcacagggtgtgtacacagggaggggcaagggccagaagcgggcgggaatccccatgtttgggcggacccagtttctaatggccagcatttgccaatcaaagcttaccagagaactctaaaagccagggctttcctgctagacaagactcatttctggaactgctttaaaaagaaacaaaacttcccaaggaccccttttcctctctgtctgcctaaaataatgttttaaaaactcctaaagcagctgaattcagcccccttcctgggggaatgtatagacggaactcccacctttcccggcatcccaaggccagagtatgtgaaactcctgggtctctatgtgtgtctgagcggctgctctgccaacactccacacagccctgtgtcctggacccaaggcccttatgacctgagctcaagaggggatctcctgatccatgggttgcaaagatccatgggagaagcatggtttctggggcggggtcacacgctcagtcactgtttccctcggatgccggagatggttcctttggctctctgccaatacagggtgaatcatcatccatccctcttttctttgttctcccgggtcaagttgtttgcctagtcagtcccaatgtgagaacctgaatatttcagttgacgcgctgacttcaaaatccccgggcttcgggaggcggagcttgcagtgagccgagatcccgccactgcactccagcctgggcgacagagcgagactccgtctcaaaaaaaaaaaaaaaaaaaaaaaaaaaaaagtccccgggcttttcttttcactcagtggaaggcagctgcttctaattggccatcttggcccgcccccaccacgtgaccttctgtaaaatgcctccactctccaggaacgctctcattatataactttgcctgaaaccaacagcacgctcattgcacatatcatgggctcatttatttcacttataaagaacctggccaaggaagagatagtgcctaaagtggccagtattctgaccgatatgttagaaaaatggtgtgccgaccaattcatgacatgtgtcccaaaactagcaacggaaattgtattcgccgtgttgaggtctctaatccagatgatgctcatctatgtactggaaaaggcagagtcctttcctgacaagctgctgaaactcttcagaaacatctcatatttcctgaagaagatgatgtctggacaagcagcacaggtcgttcagatttaactttctattcatatatccagcacgatattcgcacaattgtcacgaaaccttaccagttgatgagtcctgcacatttcctttaatttcaggaggaagagggtaatccggatgagttttctgacctactctgctgctgtgattaaacaaccaccaggaaattttgacgacactgttctcctgagctcctccctttcctccgggaacaaaacaattgaatttacaaaaataaagtgttatttgactggagtgaggtctcatgtctgcttatgcggtggctcgctgctcagaacagggtgagtctctgggttgtgtgctgaggaggggaggctctcaatctggagaaaacccactgcaggggacacctccatggggtctgagggactgaggatgaggagccggactgggtctagggaaggaggaggtttcagagggtgaaattctggcactaaagcctgggggtgtttgggaacttcctccttccgaagaagtttcagggagggataaagacaaaccctgggctccttgaggggcccttactaatttgagaggactctatcgggaaggagagtgacaatggcctccttgaggactgaggcccctgaataaatgaggcccagatacagtccatgggggatgagaccttcaagggtcacattttggttgggacagaggaaaagtgcagctctgcagccgcagaggaaaacccggcagtgtgaaagcgaccttggaggggccctgtgcgctctgaatgcgtctgagcccccatcccctgtccccgcctctctttctggattcttccagctcggctgtctccgccatcttctgagcgctccaccctgacttattcaagtttcccttctgccttccaagtactccaaaatctttcagatctgtgtccctacccctgtttttagcatgtgttggggctccaggtccctgaaggtttctggcctgaaatccacctccccagcggagtggactgcgttctagagactccacactccgcgaggttcccaggcccctgagggacaaccgagtggcctgcgcacttcagggctccacactcggcaaggtctttcaagcccttggggtccccttcttagttttttccacctttctgggctgcagtcactccataaatgctgggatctgatccccacccccactctcgtttcctcaattctgcgggctacacgctctggcaaggtcctccgggccctggatcccctccctctccctatgcccacgctcctagtcagcccttctggggtccactattttcaggaactaaccgttctcatggagccttgctaaccggaaagctgtgtggaagaaaggctttgaggatagaggtggagatttggctcttccatagtgccactcacccaccccaccatgctgccactgccagacccggacccctgtttcagaacaagtgaccagattcgctcctggacagccctggacactggccttttctctgaaaactactcaccctttctctagtccccacttcatgccagcctcataccctcttccttcccccacgctggcttccgggatcctcctctgctcagacaacctcttctgtgtcccacccccgtttttagaatgctttggggcaccaggttgggggaaggtttctggcctgatatccatctctttccaaactcccttcttcccttgaaaggcttcttgccttcagccccacttctggctccgaggtttcaggacaccctcctcttcatcctcattcttttgaccaccagctttttaggaattcgaacgtccctctcatcttcgtgaatcctgtccaggcatttgttgaccccttcatctgatacccctgacctcacattgccaaaagtctacccctacccagtacactggaattagacaaaatcccaggagttttacctcaactctgagtgtgcccacaggagctctccctgaagccacgtccttttaagcagggtctagggttcctcccttgtcttaatgaactctttgtcacacggaggacgttatggagcccttatgatctttcactgcctttctgcccagcgttttgtctttccatggacatttataatattttccatggacattttgttctctcaatgtccacccctaatttccaacatcccaaagattctcatgtgtttcctgaaagccatttacaggaatggctgtgcccagacccccttccccaggatcctccttcacacctggtaggtgcctctcctagagagatttgcactcagttgtcgtgcagtcacatggcccagatggttgttaatcacccccttcctggcaacagctagcagccagggaatcactggcacagaaacctcagggtgaccaagatgaggccacctctgtgctgaaggctgtgctccagagcctgcttgggatcaggcttaagcaggtcttcagccagacctgatgttacctggtttccttgagctgccctgcctgagctatcgggagcactccctcaatgcacatcttgattccctatctcatgctctgcttctagaaaccatgagctatcaattgctactggcaatggtcctgggaagtcaaccctaagtatggattctggggttggatgactccccacaggacttcagtgagcaacaatcactgctggcagttggaggacagagtcgctagggcatgtgaccactgtgaaaccaccgatgtttcacctggggtaattttggatgaactacggtagaagcactgaaggtacattgcttttggtttggaagattgtaggtaaataatagcgatatgaatgtggaattggatggctgcaaacgagtgccattgatgcattgaaagaggaaaagtcaggctgtcacctgtcactcagcaatttaaagtgtgagagttgggactagatgtggtggctcacatctataatccagagattcgggggaagcttgaagaggtaggatcttttgagtccaggagttccagaccagcctggacaccagagcaagacctcatctctacaacaaaattttcttaaaaattagatgggcttggtggcacgcacctgtacttgtagatctagctaatggggagcatgagataaaaaaatcacctgagtcagggacttaggggttacaatgaggtatgattgtgccagtgcacacactcccacctggccaacagagtgagattctgcttccaaaaaaataagaaataaatcaggtttgagagttggaaagcatcatcttctcctagagccaaaggacatgtacaactgagacccaggaacaaagcttcatcacaaagagaccatcatcagtggagccgggagatgcattccccctcaccctgccttgaggaggcagtggagtcatctgtctgggatcctttctgacccagccctatttgtttgtctctttggcttctttggatttgtatattttagctgttataacactgtaaaacaaacagagtgatttttttgagttgtgtgaatgatgctagctccatagtcaccctgagagtgatgggaacttttgaatttgtggcaagttggagggtagtgtaagtgacctgagattgccaaattggggctagcactggatgtgaggttaggctagtggaaaaatatgcccagaaccagaggagtgtgggctcactgcaggtggttaggctcagatccaaattgtacagatggatagctttggggtaaagaataacatagttgagaagtgcatgtgttagtctgttcatgcactgctataaagaattacctgagactgggtaattatttataaaactcaggtttaattgggtcatggttccacaggctgtacaaaaagtatgatgctggccatcagctcaacttctggggaggccccagaatagttagagtcatggcaaaaagtacaagggaagcaggctcatcttccacggccagagctggagcaagtggtaggagaggtgatacacactttcaaacaagtaggtcttttgagaactccatcaccggacagcacctatgggatggtgctaaattattcatgaaatatccgcctccataatccactcaactgtcaccagcgcagccagccccacctccaacagtggggattacaattccatatgaggtgtgggtggggacacagctccaacctcaatcagtgggcatcctggattgggtctactatagaaggagaaccaggagctgactatgatcttgaaccctacccatgatggccgggcggggtgactcatgcctgtaaccccagcactttgggaggctgaggtgggtggatcgcctgaagtcaggagttagagaccagcctggccaacatggtgaaaacctgtctctactaaaaatacaaaaaattagaccggcgttgtgctggatgcctgtaatcacaccactacgctccagcatgggaaaaaataccaaaacttcgtctcaaaaaaaaaaaaaaaaaaaaaaaaaaaaagactgcccatgaccactgcaccagtgagagggacaccagcatcactgagatgcaagggctggacattcttcataggtcagagctcaaagcaggggacactgatacagagatgggctccatccatagcaccaaagtggtgagaggatgtgggaatggcagaggccagcactttgccatcaatgcaagggggtataaggaggtgacaccagtgccagagtacatcacggggggactgccctacaatatctaggacttacctcttagagcgtgtttcattagcgacaacagatataaatggcagacaggtgtgtccctgcattaacaggaaatagaaatcatcaagaggaacagaaggcagatgtcagcagccccttagaaagtcatcatccttcatacagttaaaatctgagacagttctcacacgagaaggcctaactcaaaaagaggctgggttctcatgaggcaggtttatgcaaaaccaaggaaggtgtacaagtttggaattctccagtttcccttggaaaagacctacagtcatttgcttaggtaactgagcactgaacaaaggtgagtattgttgtcttttagaagctcttggccaagaaggccttgttggcataaaacccatggtttggaaacatcaccatgacccctgttagagtaatggcctaagggtgggggtcaggaaattgatgtattccttgccaacttctgcctctaagtgagtgaactctgtttgtgaacctctctcctctgtggttatgttcctaggctctcatgtataatcaggagtcatagacttagaaacaggaaaaatacttacagtgtttttgtggcctgtgagctatgacttataattttaggaaaaaaacaattgcaaatggaaagcctaagtctatcaatgctcatccaagacaacataatcaataaaaaccaatatcaaatctcaaggcaaattatttcctgtatatagatggcagagatgagcaccaccatcaaaaactcaaggaccagtgctgtgggtccagtcatctgtttcatggaattcaccagtctggtatcttcaaaatccagaaggatgatggcagatggcaggaaagtaatgcaaacgtcatcaggtgtgaccccactgtagcagctgtgatggatgttttctctcaccatagcaataaataacacaacctcggtcacactgtatgcattgttggtctgcaaaatccatgttttgcaaaactcttcaggaaggtggatctgtaatattggcattgacatgagaacaacagcagtatttattcacaatctcaagctctctgtcttcccgtctctctcattagccatccaagtagtcctgaggaaccaagcccatcagaacattctgcaacataatacacagctccattctccattcaaattttgttgttgttgttgttgttgatgagacaacatcttactccatcagccaggctgacgtacagtggggctatctgggctgactgtagtcttgagcttccaggctcaaggcatcctctcacctcagcctcctaagtggcttgaactacagacacacagcgacatgctgggctagtttttgtatattttgtagagacgtgctctcaccatgttattcaggctggactcaaactcctgagcgtaagtgatccaagcaccttggcctcaaagtgctgagattacaagcctgagccactgcacccagcccaatctccattctactgataacaatgtcattaccaggtctgatggacaggaaatggtaaggtttctgaaaacctaaggatcacacagcgagttccaaaggctgaaagtgcatacctgtcgacactgataccaatgacatccaatggtgagaatgacattccttgtagtcctagctctgctcataacaaatctatactgaagtgtaagagtttgatggtcatggggattttccatgtctctgcctttcagcgatgtgccatatctgtgaagtgttcagaaatgcaacagcctgaggcatgctgggcatatcctctaataaaaaggaaaatgccattttatggtcctgtatttctacaagttggaacacatgggcctgtgatccagatgggggaaatgggaatattcccactcattcaccttcatccacgaagcccatttgaaagctttgggcttcccatccttgtagattttagtgttgtgggctgggtgcagtggctttcacctgtactgccaacactttgggaggcctagacaggtgaatccactgaggccaaaagttcgagaccagcctggccaagatggtgaaaccccgtccctactaaaaatacaaaaattagcaaggtattggggccagcacctgtaatcccagctgctcgggaggctgaggctggagaatcgcttgaacccaaaaggcagagactgcagtgacccgatcctgcctttgcactccacctgggcaagcagaacaaaacttctgtcttgaaaaaaaaaacaaaaaacgaacaaaaaagatgttagagttctgggtttagaggtctataccccagaaagagaatggtttcaacaagggacaaagaagttgctttaaacgttgacttgccatttcttttcagtgtgtttgttctcttgcgtcaagagaccaccagaaaagtggtgcaattactctcctgtcaagaatcattgactatcatctgcaagagggtcagatcctggtatataattagggcagaaatacttagtctgagaagggtatgacatccagaggccctattaatgatgtccttttctccatgcctgactctgaccccatgtgctggactgcccctgtgtggatggcctcatggcctgctcggactctgaggtcccaccccaagtggcacctccatggagggctctactcttgtatgggctctgacactcacactgagacactctcccatggacacctcttcacccacttggggtctgaaactgggctactccatccctccctaacctggaacagagagctttcactgctattacacaagtcatagaggctaactcctcatttttccaagctaattattgaaacattagtcctgggttgataagacaagataagttaacttttcataaatttgcttatcaagttttgaataaattcaaataaattcaccttccccacacaccttagttgtcgacatcacacgcgcacccatactcacagggtgagcacgaaggcttcactgtcagtggagaaagtggcaaaacccttctgtgcctcatcctggtctagacctggccctcatcctttcccactcttcccctcactcccttggattcatccacactggcctcctgcctgctgctccacctccctgcgaagctcacccctgcctcagggcctttgcacgtgcagtggcttcaagccatatcctcttcacccagatctcccagatctcctgaatgatcttcttttatcattcaggtctcagcttgcatgtaatcttctcagtgaggattacccaaaccacatagttcattcattcattcaaatattcattcaatggcatattgacaaagcagctacttcatgccaggccttgggccaggtgttatggatatggcaacaaacaaaacaagagttttctgctctcaaatttttacccacttaaaggagatatcatacatcatctgtaaataaatacatcatctgtaaataatgatgtaaataaatacatcatctgtaaatctgtaaataatgatgtaaataaatacatcatctgtaaataaataaagtataataaaagaaaatagtaggtttttttggttggaggtgaccgtgaagtttgcaaataccatcttacaacacattattttattttatttcatttcatttttaattttattattattatactttaagttttagggtacatgtgcacaacgtgcagatttgttacatatgtatacatgtgtgaagttggtgtgctgcacccattaactcgtcatttagcattaggtatatctcctaatgctatccttcccccctcccccaccccacaacagtccccggtgtgtgatgttccccttcctgtgtccatgtgttctcattgttcagttcccccctatgagtgagaacatgcggtatttggttttttgtccttgtgatagtttgctgagaatgatggtttccagcttcatccatgtccctacaaaggacacgaactcatcattttttatggctgcatagtattccatggtgtatatgtgccacattttcttcatccagtctatcattgttggatatttgggttggttccaagtctttgctattgtgaagagtgccgcaataaacatacgtgtgcgtgtgtctttatagcagcatgatttataatcctttgggtatatacccagtaatgggatggctgggtcaaatggtatttctagctctagatcactgaggaatcgccacactgacttccacagtggttgaactagtttacagtcccaccaacagtgtaaaagtgttcctatttctccacatcctctccagcacctgttgtttcctgactttttaatgatcgccattctaactggtgtgagatggtatctcactgtggctttgatttgcatttctctgatggccagtgatgatgagcatttcttcatgtgttttttggctgcataaatgtcttcttttgagaaatgtctgttcatatccttcacccactttttgatggggttgtttgtttttttcttgtaaatttgtttgagttcattgtagattctggatattagccctttgtcagatgagtaggttgtgaaaattttctcccattctgcaggttacctgttcactctgatggtagtttcttttgctgtgcagaagctctttagtttaattagatcccatttgtcaattttggcttttgttgccattgcttttggtgttttagacatgaagtccttgcccgtgcctatgacctgaatggaaatgcctgggttttcttctagggtttttatggtttgaggtctaacatgtaagtctttaatccatcttgaattaatttttgtataaggtgtaaggaagggatccagtttcacctttctacatatggctagcctgttttcccagaaccatttattaaatagggaatcctttccccacttcttgtttttgtcaggtgtgtcaaagatcagatagttgtagatatgtgacattatttctgaggactctgttctgttgcattggtctatatctctgttttggtaccagtaccatgctgttttggttactgtagccttgtagtatagtttgaagtcaggtagcatgatgcctccagctttgctcttttggcttaggattgactttgcaatgcggggtcttttttggttccatgtgaactttaaagtagttttttccaattctgtgaagaaagtcattggtagcttgatggggatggcattgaatctataaattaccttgggcagtatggccattttcacgatattgattcttcctacccatgagcatggaatgttcttccatttgtttgtatcctcttttatttcattgagcagtggttttagttctccttgaagaggtccttcacatcccttgtaagttgggttcctaggtattttattccctttgaagcaattgtgaatgggagttcactcatgatttggctctctgtttgtctgttattggtgtataagaatgcttgtgatttttgtacattgattttgtatcctgagactttgctgaagttgcttatcagcttaaggagattttgggctgagacaatgggttttctagatatacaatcatgtcgtctgcaaacagggacaatttgacttcctcttttcctaattgaataccctttatttccttctcctgcctaattgccctggccagaacttccaacactatgttgaataggagtggtgagagagggcatccctgtcttgtgccagttttcaaagggaatgcttccagtttttgcccattcagtatgatattggctgtgggtttgtcatagatagctcttattattttgagatatgtcccatcaatacctaattattgagagttttcagcatgaagggttgttgaattttgtcaaaggccttttctgcatctattgagataatcatgtggtttttgtctttgggtctgtttatatgctggattacatttattgatttgcatatattgaaccagccttgcatcccagggatgaagcccacttgatcatggtggataagctttttgatgtgctgctggattcggtttgccagtattttactgaggacttttgcatcaatgttcatcaaggatattggtctaaaattctcttttttggttgtgtctctgcctggctttggtatcaggatgatgctggcctcataaaatgagttagggaggattccctctttttctattgattggaatagtttcaggaggaatggtaccagttcctccttgtacctctggtagaattgggctgtgaatccatctggtcctggactgtttttggttggtaagctattgattattgccacaatttcagatcctgttattgctctattcagagattcaacttcttcctggtttagtcttgggaaggtgtatgtgtccaggaatttatccatttcttctagattttctagtttatttgcgtagaggtgtttgtagtattctctgatggtagtttgtatttctgtgggatcagtggtgatatcacctttatcattttttattgcatctatttgattcttctctctttttttctttattagtcttgctaccggtctatcaattttgttgatccttttaaaaaaccagctcctggattcattaattttttgaagggttttttgtgtctctatttccttcagttctgctctgattttagttatttcttgccttctgctagcttttgaatgtgtttgctcttgcttttctagttcttttaattgtgatgttagggtgtcaattttggatctttcctgctttctcttgtgggcatttagtgttataaatttccctctacacactgctttgaatgtgtcccagagattgtggtatgttgtgtcttttttctcgttggtttcaaagaacatctttatttctgccttcattttgttatgtacccagtagtcattcaggagcaggttgttcagtttccatgtagttgagcggttttgagtgagtttcttaatcctgagttctagtttgattgcactgtggtctgagagacagtttgttataatttctgttcttttacatttgctgaggagagctttacttccaagtatgtggtcaattttggaataggtgtggtgtgatgctgaaaaaaatgtatattctgttgatttggggtggagagttctgtagatgtctattaggtccgcttggtgcagagctgagttcaaatcctgggtatccttgttaactttctgtctcattgatctgtctaatgttgacagtggggtgttaaagtctcccattattattgtgtgggagtctaagtctctttgtaggtcactcaggacttgctttatgaatctgggtgctcctgtattgggtgcatatatatttaggatagttagctcttcttgttgaattgatccctttaccattatgtaatggccttttttgtctcttacgatatttgttggtttaaagcctgttttatcagagactaggattgcaacacctgcctttttttgttttccattttcttggtagatcttcctccatccctttattttgagcttatgtgtgtctctgcacgtgagatgggtttcctgaatacagcacactgatgggtcttgactctttatccaatttgccagtctgtgtcttttaattggagcatttagcccatttacatttaaggttaatattgttatgtgtgaatttgatcctgtcgttatgatgttagctggttattttgctcattggttgatgcggtttcttcctagccttgatggtctttacaatttggcatgtttttgcagtggctggtactgactgttcctttccatgtttagcgcttccttcaggagctcttttagggcaggtctggtggtgacaaaatccctcagcatttgcttgtctgtaaaggattttatttctccttcacttatgaagcttagtttggctggatatgaaattctgggttgaaaattcttttctttaagaatgttgaatattggcccccactgtcttctggcttctagagtttctgccaagagatcagccgttagtctgatgggcttccctttgtgggtaacccgacctttctctctggctgcccttaacattttttccttcatttcaactttggtgaatctgacaattatgtgtcttggagttgctcttcttgaggagtatctttgtggcattctctgtatttcctgaatttgaatgttggcctgccttgctaggttgcagaagttctcctgggtaatatcctgaagagtgttttccagcttggttccattctccccatcactttcaggtacactaatcaaacgtagatttaatcttttcacatagttccatatttcttggaggctttgtttgtttctttttactctctttcctctaaacttctcttctcacttcatttcattaatttgatcttcattcacttatatactttcttccacttcatcaaatcggctactgaaggtattgcatgcatcatgtagttctcatgccatggttttcagctctatcaggtcatttaaggtcttctgtacattgttttctctacttagccattcgtctaatcttttttcaaggtttttagcttccttgtgatgggtttgaacatcccctttagctcagagatgtttgttattactgaccttctgaagcctgcttctgtcaacttgtcaaagtcattctccatccagctttgttccattgctggtgaggagctgcgatcctttggaggagaagaggtgctctggtttatagaattttcagcttttctgctctggtttctccccatctttgtggttttatctacctttggtctttgataatggtgacctagagatggggttttggtgtggatgtcctttttgttgatgttgatgctgttcctttctgtttgttagttttccttcgaacagtcaggttcctcagctgcaggtctgttggagtttgccggaggtccactccagaccctgtttgcctgggtatcaccagcggaggctgcagaatagcaaatattgcacaacagcaaatattgctgcctgatccttcctctggaagcttcgtctcaaaggggtgcctggctgtatgaggtgtcagttggcccctactgggaggtgtctcccagttaggctagatgggggttagggacccacttgagaaggcagcctgtccattcacagagctcaaacactatgctaggagagccactgctctcttcagtgctgtcagatggggatgtttaagtctgcagaaatttctgctgccttttattcagctatgccctgcccctacagatggagtctacagaggcaggcaggcctcattgagctgcggtgggctcctcccagttcgagcttccagaccactttgtttacctactgaagcctcagaaatggtgaacacccctcccccacccagtctgccgccttgcagttccatctcagactgctgtgctagcagtgagcgaggctccatgggcgtgggacccactgagccaggcacaggatataatctcctggtgtgccatttgctaagaccattggaaaagcacagtattaaggtgggagtgtcccaattttcccagtacagtctgtcacgggttccctcatctaggaaaggtaaatcccctaaccccttgtgcttcccggtgacgcaatgccccaccctgcttcagctagccctccatgggctgcatccactgtccaaccagcccaatgagatgaacaaggtacctcagttggaaatgcagaaatcacccatcttctgtgtggatcaggctgggagctgcagaccggagttgctcctattcggccatcttggaatggcaatctatgtttgctttttacatttgaaaaaactggtgtcacgtacctaggtattaatcattgtggtatcctcttgccgatttacctctttatcattaactagtgaccctccttgtcttttgttgttacagtctgtgattttagtctattttatctaatatgagaatagctactctggcacttttttggtttccagcttcatgaaatatccttttccatttccctgttttcatttccctttcggtgtctctatagatgaagttgatttctttaaggcaccataagttgggtcttatttctttatccatttgaccatttagagaatttagaacactgtcagtgttattattcataagtaaaaacttaagagtgggtgtagtggtgtacatctgtatttcctgcactttgagagactgaggcgagctgatctcctggggtcaggagtttgagaccggcctggtcaacatgatgaaaccctgtctctactaaaaatacaaaaattagccaagcatgctggcatgtgcctgtaatccaatttacttgggaggctgaggcaggagaagcttgaacctgggagacaaatgttgcagtgagctgagatcacacagagaagtcatctccactctcctcatcagaacctcttgttcacagcatttgtgagcacaaatcaatgatggttattctttcctactaattagggatattttattacacagcaatagcctccagcaaagggaaccatcatacatgattcctacaagttgacagggctggaattatcactgaaaaactaaggtggctatacttgattcccaatgtccaatttttcatgaatagagaaatttatcctttttccccccagccagaaaccaagttttgctcttacgcccaggctggaatcaagtggcacaatctcagctcactgcaacctctgccccccagcttcaagaaattcaccttttgaacaaggagatattaaggatacactatgtgtatgctaccggtggttgcaggagactcagaaaagagagaaacagtcactggcctcgtgcaactgatattctcgggaggagagaaaggcaatcaagaaagaaacatgctgtatttcagacagctgtaagtcctccacaagaaaagaaagcaggtgaggaacataggaaatgtgtcaaccataaggttcccgctaattctataagttggtcagggatatcctccaagaataagcagcatctgagcaatcacctgaagggaggaaggaaggaagactgtgagtggtggcttacacctgtaatcccagcactttgggaggccaaggagggcagattgcctgagctcaggagttcacgaccactcagagcaacctgttgatacccaatctctactaaaaacacacaaaaaaattacccgggtgtggtggcacgcacctgtagtcccagcttccatgcccagctgatttctctctctccatatatatatatatatacacatatattgtttttgcagagatagggtctcactgtgtcacccagtcatcaagcaattctcttatactgttttggaaaagcatgggaattacaggtgtgaaataccctgctggtcctgaaaaatgtgatatttgggattctctgcctggcttgttttacccaaaataatgacctccagttccttccaggttgctgcaaaagacatgattttcactgttttataactgaatagtattcctgtatgtatacataccacattttctttatttattcttctgttgattgacatgtagggtgattccatgtctttgctactgtaaataatgctgcagcaaatatttgtgtgcattttgatctattcctttgagtaggtacccagtactgcaactgcaggactgagtagttgttatattttttgttctttcagaaatctccatagtgtttgccataaaatctgcactaatttacattcccaacaacaatgcataagatttccccttttctccacattctcactaacatttgttatgtttttgtctttttcataatacccattctgactggagtaagatatctcattgtggtggttgttgatatttttgagacggggtctcactctgttgccagactggagtgcagtggtgtgatcgtggcttgctgcaacctccacctcccgggttcaagcaattctcctgcctcagcctcccgagtagctgggactacaggcgcgtgccaacaggcctggctcattttttgtatttttagtaaagacagggtttcaccatgttggccaggatgatcacagtctcttgagctcatcatacacctgcctcagcctcccaaagtgttggaattacagtcatgaggcagcgcacccaacctcaatgtggttttaatgaccatttctctgacgattcatggtgtggagaatttctttgaaataccttttggccatttatatgtgctcttttaaaaactgactcctgtccaggtgcggttgagcatgcctgtaaccccagaacttcgggaggctgaggccaatggatcacttgaggcaaagaggcagaaatcagcctggccaacaaggcaaaaccccatctttactaaaaatacaaaaaatcagccacgggctgtgactcgtgcctgtggtgcaagttactcaggaggttaaggcacaggaattgcttgaacccggtaggcacaggtcacagtgagccaagatcatggcactgcactacagcatgggtaatagagaaagacctgtctcataaaaacaaatgaataaataaataagataaaaaataaaaaagtctctttatgtcctttgccgactttttaatgggattctttggagttttctgttgtagttgagatctttgtttactctcggtattagtcttttgtcaaaggaaaagtttacaaataatttcttccgttctgcagtttgtctgctcactctgttgagaggattatttctttggctgtgcagcagctttttgtttcagtaaagcttttgaatttatataattaaaattttcagtttggtttaaatttgcactggtcgatttttggttttgttgcctgtacttttgaagtcatactcttgaactctttactagacaataaccagaagagttttctctagttttcttctcacatttttattatttcagtacatatatttaagtctataattcatcttcaattgatttttgtagaaatagtgagaaataggagtccaggtttattcttctgcaaatgacaattcaattgttccagcaccaattattgaaaagggtgtgctttcctcaacgtatattcttatcagctttgtcaaagatcagttggctataaatgtgtggctttctttctgggctctctagtctgttacatcaatctgtgtgtctatctgtatactactaccatgctgtattggtgatgatggctttgtaatataatttgaagtcaagaaatgtgatgctcccagctttgtttatttgcttcagaaaggctgagtcaacagctgcagagatgaagctgcccctcctcgcagggctccttcccggaaaaagatcatggctcccactgaccatataaccatggctggaactcctgaaattcccaaagggaggccctacccagtgaggggggatgaatgaaggtcctacttaaggaatctgtctggccacaatcaggcacagcagctgtgctgccttgtgggggaccagaccacctggattccctggagcctgcaggctagaatgtctgagtccatggaaacacagaaatggaggccgccctcacctccccagaaaactgtagtctcaggcagtctccagccgattgccactggttggctgctattccaagccagtgggtcttaacttgagaggtgctgtggaagtggggcccacggaatgaggctgcttggctccctggattcagccccttttctaagggaatgtacagatggaactcccgccttgcccagctttccaagtatataaaactcctgagtctctgtgagtgtctgagcgagtgctctggcaacattcgacacggctctgtgtatctgacccaagacccttatggcatgagctaatgggaggatcttctgatccatgcgtggcaaagatgcatgggagaaacatggtttgtgggtaggggttgtgcattcactactgcttctcttggctgtaggtgaaggtttctttggctctgtgctgatactgggtgcaccatcacccaccccctttgtttcttctcctgggtcaagtcatttgcctaatcagtcccaatgtaggaacctggatacttcagttcaaggtgctgaattcaccgtgcttttcattcaggggaagacagctgcttctcattgggcatcttggcctgcccacttcacgtcactttttgtaaaatccacaccactccaggaatatccattacttaacttcgcctgaaataaacagaaggctcattacacttatcatgggctcacttacttcgcctataatgaaggtgccatggaaatgctagtggatgacgtggtccattttcttagggatgagatagaaaaatggtgtatggctttttaatttaattaaaatttttagtttggtttaaatttacattggtctctttttggttttgttgcctgtacttttgaagtcttactcgtgaactctttactggacaatgaccagaagagttttccctaagtttcttctgatattttgaccatttcagtacatacatttcagtctataattcactttaaattgatttttgtaaacatggtaagaaataggagttcagatttattcttccgcatatgataatgcaactgtcccagtaccaattattgaaaagggtgtgctttccctagtgtatattcttgtcagctttgtcaaagatcagttgcctatgaatgtgtggctttcattttggattctctcgtctgttacatcaatctgtgtgtccacatttatacctgtaccatgctgtattggtgactatggctgtgtaatatattttagagttaggaaatgtgatgctcccagctttgttcatttgcttcagctgaaaaggttgagtccacaattacaaagatggcagccgcccatccccggaggacctccaacccagaaagagatcaggcttcccaccaaccctataaccctggctggagttcctgaaattccaacagggaggaccttcccagtgaggagggatgaatcaaggtcaaatttaaagaaacagtctggccactatcaggcacagcagcagtgctgccttgtgggggacccctcctgctccagaccagctgccctccctggagcccgaaggctagattgtctgagtctacggaaacagagacggtggccgccccaaccacccagaactcggtagtctcaggcacttggcttgctatcttgccactgcttggctggtattccaagcccgtgggacttgagaagtgctgtgatgatggggaccacaggatgaggctgtctggctccctgtgatatggctgtgatgagtggaggaacaccagggctcatgtctcacacagaattggagaaaatgacacaaacacatgtacagtggttttatggcgtgcagtttaataggcaagaacgaaggaagagctccccatactgagacagagggaggggggctccaaagccaaaagaggaaacccggagtgctgtggataccaatgagttatatgaagaaactggagggggcggtgtctgatttgcatagggttcaggcgattggttcgaccaggcatgtcatttatgtggcccacggaaaaactggccctcccacctagcctttgaatatgcacgtgccggacaccctgatttcctacactcatggggatatatgggggtggccatatcgccaggcacaggtggggacaagggccagaagagggcgggaatcgctatgtttgggtggacccagtttctaatggccggcatctgcagatcaaggttaccggagaactctaaaagccggggctttcctgctagacaagactcatttctggagctgctttaaaaagaaacaaaacttcccaaggaccccttttcctccctgtctgcccaaaataatttcttaacaactcgtataacacctgaattcagcccccttactgggggaatgtaccaacggaactcccacctttcctggtttctcaaggctagattgtgtaaacctcctgggtctcggtctgtgtctgagcagctgctctgccaacactccacacagccctgtgtactaggcccaaggccgccgtgactcagcccatgggaggatctcctgatttcttggttgcaaagatccatgggagaaaaatggtttctggggcggggtcacacactcatggcttctcttggctgtgcaagaaggttcctttggctctgttccaatatagcgtggttcatcacccacccctgttttctttgttctcctgagtcaagttgtttgcctagtcagtcccaatgtgagaacctgaatatttcagttcacgtgcttatcgtgaaattcactgagactttaattcagtggaaggcagcctcttctaattggccatcttggcccgccccctccacgtcacctcccataaaatggccacgctctccagggacgatgccattatatatctttacgtgaaaccgacagaacacttattacactttttgtgagctcatttacttcacttataatgaacatggccatggaaatgctagtggagaaagtggtcgattttctgatggatgtgataaaaaaatggtttgccgaccaattaatgacatatgtctcaaaactagtaacgagacccttaatcgctgggttgaagtttctaatcaagaagatgctcatctatgtattcaacaaagcagcttcccttgcttctgaaatgcttccaaacaacatctcatatttcctgaagaagataatgcctggacaagcagcacaagtcattcaggtttactttcagctcataaatccagcaggatattcgcacaattgttgggaaaccttatcagttcatgagtcgtgcatgtttcctttaatttcaggaggaagagggtaatctggaagagtttcctgacctactctgctgctgtgattaaacaaccaccaggaaattttgatgacactgttctcctgagctcctccctttcctcggggaagaaaagcattgaaactacaaaaataaagtgttatttggctggagtgaggtctcatgtctgcttatgcggtggctcgctgctcagaacagggtgagtctctgagttgtacgctgaggaggggaggctgtcaatctagaaaaaacccattgcatgggacacctccatggggtctggggggctgaggatgaggagctggactggatctagggaaggaggaggtttcagagggtgaaattctggcagtaaatcctgggggtgtttgaaaacttcctccctcagaaggagaagactcagggaggaataaggacaaaccatgggtcccttgaggggcatttactaacttaagaggactttatcgggaagcagagtgacaatggcctccttgaggactgaggcccctggataaatgaggcccagatccagatccagtccatgggagatgagaccttcaagggacatatttttgttgggacagaggaaaagtgcagctctgcagctgcagaggaagccttggcagtgtgaaagcgaccttggagggggccctgtgcgttctgaatgcttctgaggtccatcccctgtccccgcctctttttctggattttttgggctccatggtctccgccatcttctgagcgctccacgctgccaccttcagttttctcttctgggctccaaatactccaaaatctttcatatctgtgcccctacccctgtttttagcatgtgttgggactccaggtccctgaaggtttctggcctgaaatccacctccccagcggtgtggattctgctctagagaccccgcacttggcaaggttcccaggcccctgggggacaaccgagtggtatgtgcacttcagggctccacactcggcaaggtctttcaagcccttggggttccctcctcagttttcttcacatgtctgggatgtagtcactctataaatgccgggatgtgatccccaccccagtgattttttttagttccatgagtgttgctatctgaatagtcatcctgagagtgatgggaccttttgaatttgcagcaagttttagattagtgtgagtggcctgagatcgcaaaactggggctagcattggatgtgaggttaggctggtggaaaaatttgcccagaacctgaggagtgtgggctcactgcaggtggttaggatcagcacagaattgcaaggatgtatagctttggggtaaagaataacatggttcagaagtacatgtattagtcttttcatgcattgctataaagaattacctgagactgggtaattaattataaaaactcaggtttaattggctcatggttccacaggctgtacaaaaaggatgatgctggccatcagctcaacttctggggaggcgtcagaaaacttagagtcatggcaaaaagcacaagggaatcaggctcatcctccatggccagagctggagctagtggtaggagaggtgctgcacacttttgaacaatcagatctttttagaactctatcaccagacagcacctagaggatggtgctaaattattcatgaaatatccacccatatgatccactcaattctcaccggcccaaccaggaccacctccaccattggggattacaattacacatgagatgtgggtggggacacagatccaaactcgatcagtgggcatcttggactgggtctactatagaagaagaaccaggagctgactatcatccttaagactgcccatgatggccaggcagggtggctcatgcctgtaatcccagcactttgggaagccaaggtgggtgaatcccctgaggtcaggagtttgagaccagcctcgccaacatggtgaaaccctgcctctactaaaaacacaaaaaattagatgggtgttgtgccagacgcctgtaatcacagctactccagaggctgaggcatgagaattgcttgaacctgggaggcggaggtggcggtgagccccaatcgcactgctacactccagcatgggcaacaataccaaaacatcgtctcaaaaaaaaaaaaaaaaaaaaaaaaggctgcccatgaccactgccccagtgagagggacaccagcatggctaagatcaagtgctggacattcttcatgggtcagacattaaagcaggccacactgttacagagatgggctccattcatagcaacaaagtggtgagaagatgtgggaatggcagaggccagcactttgccatcaatgcaaggtgggcataaggagctggcaccagtgccagagtgcatcaggggaggactgctttgcaatatctagcacttacctcttagagtatgtttcattagggacaacagatataaatggcagacaagtgagtcccttcagtaacaggaaatagaaatcatcaagaggaacagaaacagatgtcagcagccctcatataaagtcatcatccttcatccagttaaaacctgagacagttctcacataagaaggtctaattcaaaaagagactgggttctcatgaggcaggttcatgcaaaaccaagggaagtatacaactttgggattctccagcttcccttggaaaagacctacaatcatttgcttaggtaactgagcactgaacaaaggtgagtattgttatctttcagaagctgttggccatgaaggtcttgctggcataaaacccatggttggaaacatcaccatgacccctgttagagtaatggcctaagggcaagggtcaggaaattgatgtattccttgccaacttctgcgagacgagtgttggtccactcatctctttcacggaattcaccagtctggtatcttcaaaatccagaaggatgatggcagatggcaggaaactaatgcaaacaccatcagttgtacctccactgtagcagcagtaatggatgttatctcttcattgtaatatccagggagggagaagatgacattattctcaatattctaaacaccctgtgtgtacagcctctgtgatattttttgtaatatccgtgtgggagagaattatattactcctaatatctcaggggttgtgccccctctgtgacaatgttcctaacacccaggaggggataggatgatatcacttttagcatcacagggggtgtacaccccactgtaatattgttcataatatccgggggggagagaatgatattactcccaatatcgcaaagactgtacaccaacctgtgatattatttgtaatatccataagaggaagaataatattactcccaatgtcacaggaagtgtacacccttctgtgatattgttcaaaagatccagttagggaggggatgatattactctcaatatcttaaacaccctgtaggtaagccctctgtgatattcctcataatatccagagggagaggatgatattactcccaatattgcatgaagtctacaccccacctgtgatattgttcctaatatccaggatgggagaggatgatattactcccaatgtcgcaggggatgtacaccttccctgtaatattgttcgtaatatctagaaaaggagaggataatattactttcaacatcgcagggggtgtacaccttccttgttatattgttgctaatatccagggaaaaagaagatgacattaccaccactattgcagaaggtgtacacccccccttgatatagttcctaatatccagaaaaggagaggagatattactccaaatattgcaagaggtgtacattcccctgtaatatttttcctaacattcaggaagaaagagagtgatattgcccttaatattgaagggagtgtgccccccccgtgatattgtttctaatatccaagaaatgaaaggatgatattactcccaatatcacaggggctgtacagccccctcccatgatattgttcccaacatcggggggggggtgaaatagtattattcccagtatcacaataggtgtacacacctgtcgtgatattgttcctaatacccatgggggaaaggacgatattattcttaatatctcagagggatgtacaccctccctgtgatattgttcctaatatccggggtgggagaggatgatattacccccaaaatctcaaagggtgtacacccctcttgtgatattgttcctaatatccagggtggagaggataatattattcccaatatccaggaaaggaaacgatgatgttactgtgaatattccagggggtgtcctcccctctgtgatattgttcctaatatccaggttggggagattatgatatttctccaaatatcacaaggggtgtacaccaaccctgtgttattgttcctaatatcgatggggggagaggacgatattactcccaatatcacagggggtgtacaccacctttatgatattgttcctaatatccatgaagaaagaggatgatattactttcaatatcgcaggggatgtacactccccctgtgatattgttagtaatacctaggagaagaaagtgtgatattactcccaatatcgcaggggatgtacacgcttcctgtgatattgttcctaatatttagggggaaaggggatgatattactcccaatatcgaatggtgtgtacacccccccgtgattctttttttttttttttttttttttttgagatggagtcttgctctgccgcccagactggcgtgcaatggcgcaatctcggctcactgcaacatttgcctcccaggttcgcacgattctcctgcctcagccttcggagtagctgggattataggcagctgtcaccataccaggctaatttttgtatttttagtagagttggggtttcaccatgttggtcaggctggtcttgaattcctgacctcaaataatccacccaccttggcctcccaaagtcctgggattacaggcataactttccctgtgatattcttcctaatattcaggaagaaagaggatgatattgctcccaatatcgcagagagtgtgcactcctcctgtgatatggttcttaatattcagaggaggagaggatgatattactttctatattgcagaaggtgtacacctccctcgtgatgtctttcctaatatccagtgggggagaggttattagtctcaaaatcacagaaggtgtaaacccccatttgatattgttcctaatattcaggggtggggagagaaaggtattactcctagtatttcagggcatgaacacccccaccgtgatatcattcctaatatccagaaggggaggcaatgatatttctcctaatatcacaaagggtgtacaccccttctgtgatattgtaaatattctgtgtgtacacccccctgtgttatagtctgtaatatccgggtgggggagagggtgatatttctccccatattgtaggggatgtacacccttctgtgatatggttcgttatatccagggaagaaaaaggtaatattgctgcccatattgtggagagtgtacacccccatgtaatatggttcgtaatatccaggagtggagagggtgatactgctccttacatcgaggaaggtgtacaccttattgttatatgattcgcaatatccaggggaggagagagtgatattgctccccatgtcgcagggggtgtaaaccctccgtgatatgattggtaatatccaggaaaggaaagggtgatatttctccccatatcgcgggggacgtacatcctcctgtgatatggttcgtaatatccaggaggaaagaggaaaatattgctcttcataacccgaggggtgtacaacccctgtgatatggttcgtaatacccagaagtgtacacccctctgtgatatggtttgtaatatccagggggttagagggtgatattgctccccatatcgcagtgggggtacacccccctggattggttcataatattcatggggggagaaatttacatttatcctcatatcagggggggtgtacaccccccgtgatatggttcgtaatatccaggggaagaaagggtgatattgctccttatatcgcggaaggatcaccctcccctgtgatatggttcataatacccagacgggaagagggtgatattgttcttcataaagcgaagggtgtacagccccctgtgatatggttcataatatgcaaaaggggagagggtgatattgctccccatatcacggagggtgtactcccttctttgatatggttcgtaatatccaggggtgtagatggtgatatagctcgccctattggggagggtgttcacccctctgtgatattgttcgtaatgtccagggaaagagaggatgatattactcccaatatcgcagaaggtttacaccactctgtgatattgttcataatatccagggaaggagaagacgatattactcccaatatggcagggggtgtagaactcctgtgatattgtttgtaatatccaggcaaggagaggatattactctcaatatcgcagaaggtttacacccctatgtgatactgttcatgatatccagggaaaaagaggatattactccctatatcacaaagggtgtacacccctttgtgatattttttgtaatatccaggggagagaggataatattactctcaatatcagaaggggtgaaaaccctcctgtgtcattgttcataatatttagggaaggagagagtgatattactccaaatatcacagtgggtgtacacccccctatgatattgttcctaatttccagaaggggagatatgatattattgccaatatcgcagaaggtgtacaccttactctgacattgtttgtaatatccagatggggaaatgatgatattactcctaatatcacagggggtgtacacccccttgttttattgtttgtaatattcaggggaagagacgattatattactcccaatatcgcagggtgtgtacaacactctatgatattgttcataatatccaggggaggagaggaagtgtacacccccccgtgatattgttcgtaatatccagaggtagagaggatgatattactcccaatattgcaggtggtgtacacctttctgtgatattgtcatgatattaagaaggggagaggatgatattactaacaatatcacaaaaactgtacactccctgtgatattgttcataatatccagaagaagggaggatgatattattctgaatctcgcagaagatatacaccaccctgtgatatggttcataatatcctaggggaaagaggatgacataactgtcaatatcgcagggggtgtacaattccctgtgatattgttcacaatattcagagggaaaaaggataatattactttcaatatcgcaggcggtgtacacattactgtgttattgtttataatatccggaatgagagaaaattttctcccaatatcacaggaggtgtacactcccctgtgatattgttcgtaatatccagggaggggagaggatactattactcccaacatctcagggagtgtaggccccccctttgatattgttcctaatattcggaagtggagaagatgatattacttccaaaatcgcagggggtgtacactccctctgtaatattgtttctaatattcatgagtggaaagaaagatattactcccagtattgcaggggacatacaccacactgtgatcttgttcacaatattcgggggggagaggatgatattactcccaatatcaaagtaggtgtacacccccttctgatattgatcgtaatatccagaattaaagatgataacgttactcccaatattgcagggggtgtacatttttgaatactgttcataatattaagagggggaggggatgatatctgtcccaatatcgcaaagtgtgtacacctcctgtgacattgtcccaaatatccagaggaaaaaaggatgttattactcttaatatctcagagagtgtacacctccctgtgatattgtttgtaacatccagaagaaagaggctgatattactcttaatatcgcagggggtgtacacccccgccccgggatattattcgtaatatccagggggaagtggaatgttcagaatgggagaggatgatattacttgcaatatcatagtgggtgtacaccccactgtgatattgtttgtaatatccgggaaaggagaaaatgacattcctccccatatggcaggggctgtacaccacctatcatattgttcaaaatatccagaaggggagaggatatgtctccaagtatcacagggggtgtacaccccgctgtaatattcttcctaatatccagggtgtgagaggataatagtactcccaatatcccagggcatgtacaccccccttgtgatgttgttcctaaaattcatggggagaaagaatattactcccaatatcacagggggtgtacatacactctgtaatattgttgccaatatgcagcaggagagaggatgatattactcccaatatcacaggggctgtacaccccgctgggatattgtttctaatatcaagggggaaaaaggatgatattactcccaatgtcgcagggtgtgtacttcctctttgtgacattgttcctaatatccaggagagaagagggtgacattccttccaaaactgaaaggggtgtacacaccctttgagatattgtctttaatatccagaacgaaacaggatgatataactcctaatactgcaggggggtacaccctctctgtgatactgtttctaatatccaggaggggaaagaaaaatattaatcccaatatcacagggggtgtacattccccctttaatattgttcctaatatccaggaagacacaggatgatactatttccagcagcacagggcatgtacacccctttgtgatattgttcctaatatccaggaaaagagaggatgatattactgtcaatattgcagggcgtatacactggttctgtgatattgtttctaatatccgggggtggagaaaatgatattactcccaatattccagcgggtgtacacccgttctatgatattgttcctaatatctgggggagagagaatgatattattgtcaatatcacaggggatgtacagattccctgtgatattgtttctaatattcacagggggagaagggtataatactcccgatatcgcagggggtgtacactccccctgtgaagttgttcctaatatccagggattgagagaatgatattactcccaatatcacaggcggtgtaaaccccctgtgtgatattgttcctaacatccagaggaaaagatgatgatattattttcaatatcacagggggtgtacgcatccctgtgatattgtttctaatatccaggggaggagaggatgatattattgttaatatcgcagggggtgtaccccaccctgtgatactgttcctaatatccggggtggaagaggataatattgctcccaatatcgcaaagggtgtacaaccttcctgagatattggtcctaatatccagggagggagaggatgatattactttcaatatcacagggagtttacacaacccctgcgatattgttcctaatatccagcggaagaagagttaggataatactattttcaaaattgctgggtctgtaccccctccccgtgatattgtttctaatatccaggaggggagaaagtaatatgactcccaatatcttagaagatgtacaccctccccataatattatttcttacatccagggggtagaggatgattttgctttcaatatcacagagggagtaaacctttccggtgatattgtttttaatatttaaaaagagagaagataaaattactcccaatacaaaggggatgtattgtgtactcccccctctgatattcttttttaatatccagatggagagaggatgatattactttcaatattgcatgggatgtataaatcccctgtgttattgttctgaatatacaggtggggagagtatgatattactccaaatatcgcagggggttctttccccctgtgatattgttcctaacattcagggagggagaggatgatattactcttaatattgcagggggtgtacccacgcctatgatattgttcctaatatccagagggggagaggatgatctaactcagaatatgacaaggggtgtacacacagcctgtgatatggttcctaatatacaggggagaaggggataatatttctcccaatatcgcagggggtgtacaaccccctgtgatactgttcctaatatacagaaggggacagcatgatattgttcctaatatcgcaggaggtgtacaacgccctgtgatattgttcctaatatccagggcgggagaggatgatattaccctcaatatcgcagggggtgtgcactttccctgttatattgttcctatgatccgggtggggggaaatgacattagtcccaatatcgcaggatgtgtgcaccgctcccccgtgatattgttcctaatatcaagggggagagaggaggatattactcccaatatcgcaagggatgtacatcctccatgcgatattgttcgtaatattcaggaggagagaggatgatattactcttaatatcgcagaaagtggacacccaccctgtgatgttcttcataatatccagggaagcagacgattatatgactttcaatatcgctgggagtgtacatcccttttgggatattgtttctaatatccaggaagggagaggattatattactctcagtattgcaggcagtgtacaccttttttgtgatattgttcctaatattcagaaagggaaaggatgatattactcccaatattgcaggtggtgtatatccccctctgatattgttccttatatcaaggaagagaaagaataatattactcccaatatcaaagacagtgtagacccctcctgtgatattgtatttaatatccatggggaaagaggatgatgttactcccaatatcgcagggggtttacacccacactgtgatattattcctaaaatccagtggaggagaaaataatattgctcccaatattgcagggtgtatacaggccctcccccgttatattgctcctaatatccagcggtggagaggatattactttcaatttgtgtagggagtgtatacccccctgtgatatttttctaatatcaaggatgggaaaggatgacattactcccaatatcgcaggaggtgtacacgccctgtgatattgttcctaatatctagggaaggagaggatgatattactttcaatattgcaggagctgtacaccctctgtggtattgttcttaatatttaggttgggagaaaatgatatgagtccaaatatcgcagaaggcatacacacttccaataacattgttcttaatatccgggggagagggtgatattactcccaaaatctctggggggtgtacacccccttctgatatttttcctaatatccagggaaggaaacgatgatattactataaatattccaaggagtgtacaccttcctaatatcctaatattgttcctaatatccaggggtgggagaggattatattactcccgatatcgcagtgggtgtacacccctcctgtgatattgtttctaatatccaagctaggagaaaatgatatcactctcaataccacagggggtgtacaccttccgcatcatattgttcctaatattcagagggaaagaagatgaagttactttcaatatcggaggggttgtacacaacccctgtgatattgctgctagtatccaggaagaaaggggattatgttactccccttatagcagggggtatacacctcccctgtaatattgttcctaatatcaaggctgggatatacgtggggggaaggatgatattactcccaatatcgcaggggttatacaaccttctgtgatattgctcctagtaaccagggcagaagaagatgatattactcctaatatcgcaggaggtgtacactcccccattatgttgttcccaatatgcagaaaaggagaggatgacattattgccagtatcgcagggtgtgtacaccacccctgtaatattgttccaaatatttagggggagagaggatgatattactcccaacatcgcagggggtgtacacacatcccctgtaatatagttcttaaaatctaggggaaaaggggatcttatttctctaaatattgcagagggtgtacactccccggtgatattgttcctaatagccgggagggagataattaaattactttcaatatctcagagagtgtacatcgcccttgcgatattgttcctaatatccagagcaaaagagaatgatattactcccaatatcttaggagtgtacatttaacctgtaatattgttcctaatatccagggggaagagaatagtattactgccaatatcgtaggggttgtacaccttttctgtgatattgttgcaaatatttagtagagggaaagaatattactcgcaatatcacagggaatgtatacttcccctgtgatattgttctgatatccagaaaaagagagggtaatattactcccaatattgcagggggtgtacaccccccttgtgatattgatcctaatataaaggaaggaagaggatattactcctcatatagaaggggttgtccaccccccttgtgatattattcctaatattcagggaagcagaggatgatattattttcaatatcacagagggtgtgcagtccacctgtgatattgttcttaatattcggggggagaggatgttattatgcctgatatcgcagtagaggtacacccctcaagtgatactgttcctaataaccaggggtgaagaggatgatattactcccaatatcgcaggtggtgtacacccccccatgatggtttctaatatacagagggggagaggaaaatattactcccaaaatcgctggaggtctacaccccccttgtgatattgttcctaatatccaggaaaggaaacgatgatattactgtgaatattccagggggtgtacacccgctttgtaatattgttcctcatatccagggtgtggagaggattatattactcccagtatcgcagggggtgcacgacgcccctgtgatattgtttttcatatccaggaggggagattattatcaatatggcaaggggtgaacaccccctgtgatattgtacttaatagttaggttggcagaaaatgatattagtctcgatatcgcagggggtgtgcactccgcctggtgatattgcttttaatatcaagggggagaaaatggcattactcccaatatcgcagggggtgtacaccgctcatgtgatattgttcctaatatccaggtggagagaacataatattactcccaatatcgcacaaggtgtacacccctcctgtgatatggttcctaatatccatgggaggagatgatgatattactcccaatatcacaggggatgtacaccacccttgtgatattgttcctaatatccagggaagaaaacgatgatattattgtgaatattacagggagtgtacacactccctgtgatattgtttttgatatacagggtgggagaggatgatattactcccaatatcacataaggtgtacaccccccgtgatattgttctaaatatttcggtggggagaaaatgatattagtctccatatcacagggggtgtgtgctcctcaggtgatattgtttttaatatcaagagggggaggagattatattactttcattatcacagggggtgtacacccctcctgtgatattgttccttatatccaggcgaggggaaaataatattactctcaatatcgcaggaggtgtacacaccccatgtgatattgttcctaatattaagggggaaagaagataatattactttcaatatcacagggtttgtactcctttcttgtgatatagtttttagtatccagggggaaagagcatgatattactcccattgtagcaaggggtgtacacacctcctgtgatattgttcctaatatccagaagtggtgaggatgatattactcccaatatcgcagggggtatacaccccacctatgatattatttctaatatccatgggaaaagagtatgatattacacccaatgtcgcagagggtgtgtatttttcctgtgatattgtttctaatattcaggcggggagaagatgatattactctcaatatagcagaaattgtacatccccgctgtgatattcttcataataatcagggaaaaagaggatgatattactaccaatattgcaggggggttacacttcccctatggtagtgttcctaatatccaggaagaaagaggatgatattaatcccattatccaggaagtgtacacccaccctgtcatgttgttcctaatatccagcagggaagaggatgatattacaccccccccccgtgatattctccttaatatccaggaggggagaggctgatattactggatatatagcaggggtgttcataccttctgtgatattgttcctaatatccagaaaaggagaggatgatattacttccaatatcgcagaaggtgtacacctccctgtgatattgatcctgacattcagaaggggagaggatgatattactcaaaataccgcagggcatgtgcattcccttgtgatattgttcctaatacccagaagggaacaggataatattactttcaatatcgcagggagtgcacacccccctttggtatggttcttaatatccagaaggaaagagggtgctattactttccatattgcaaggggtgtacaccccactgtggtatggttcataatatccaggcagggagagggtgctattactccccacagtgcggggcatgtacaccctgctgcggtacggttcctaatatccagggggagagaggatgctatgactccctatatcgcggggtgtgtacacccctgtgtggtatgttttgtattctccaggaacggagagggtgttgttacccctcatatcgctggaaatgtacactcccctgtggtatggttcgtaatatccaggggattgagggtactgttacccccatactccccatatcgtggggggagtgcacctccctgtggtatggttcgaaatatccagggtaagagagggtgctattattccccattttgcaggaggcgtacacccccctatggtatggttcgtaatatccggggtgaggggatgctatcaaaagaagagagaaagagaccccccatattgttctatattattttatactcagtacctgttttaagaagaaacaaggaagtgaaaccaaaagcaggcagcccggcgccaggcaccagacccaaaaccagacccgaaaccaggcctgggcctgcctgaccttagcctgatagttaaaattcaacccatgacctagcaaccaatgttatccatagattccagacattgtatggaaggacattgtgaaatttcttgttctgtgctgtttcactctgattaccggtgcctgcagcccctgtcacatacccactagattgctcaatcaatcatggccctttcatgtaagatctttagtgttgtgagcccttaaaaaggacagaaattgtgcactcaacaagctcggattttgagacgctagtctttcgatgcttccagctgattaaaagccacttccttcactacctcggtgtctgtggggttttgtccgcgactcctcctgctacactatgactccccatatcaaggggggtgtacacccccctgtggttcgtaatatccagcaggggaaaaggtgctattactccccatattgcagggagtgtacacccccttgtagtatggatcgtaaaatcaaggggggagggaaggtgtaattatccccatatctcagggggtgtacacccctttgtggtaaagtttgtaatatccagggatattacagggatattatccccaaattaatacttttataatttcttatgcctgcctttactgcaatctctgaacataaattgtgaagatttcatggacatttatcacttccccaatcaatacttttataatttcctatgcctgtctttactttaatctcttaatctcatcatctttgtgagctgaggatgtatgtcgcctcaggaccctgtgatgattgcattaactccacaaattgtttataaaacatgtgtatttgaacaatatgaaatctgggcaccctgaaaaagaacaggataagagcgatgttcagcgaacaagggagataagcataaggtctgactgcctgtggggctgggcagaacagagtcacatttttcttattgcagaaaatgagtaggagaaatatcactgggaagggaacgcattcctaggggaggcctatggacggccgctctgggggtgtatcccttatgtggttgaagataagggatgaaatacaccctggtcccctgcagtgccctcaggcttgctaggattagaaattccagcctggcgaattctagtcagaccagttctctgctcttgaaccccgtttcctgttaagatgtttatcaatgacaatgcgtgcacagcaggacatggaacctcaatagtaattccattttctccctggccttgtgaccttgctaggcccttctgcccttgtgatcttttattgccatttgaagcatgtgatctctgtgacccactccctattcgtatccccctccccttttgaagtccctaataaaaacttgctggttttgcagatcaggtggtcatcacagaacctgccgatatgtgatgtcaccccggaggctcagctgtaaaatttctctttcgtactctttcactttatttctcagaccaggtgacacttaaggaaaatagaaaagaacctactttgaaatattgggggctagttcccccaatagacattgttcctaatatccagaaaaaaagaagatgatattactcccaatatcacaggggttgtgaaccccacctgtgatatggttcctaatatccaggaagggagagaatgatattactctccatattgcagggggtgtgcacatccctgtgatattgttcctaatatccaggggaggagagggtgatattactcccaatattgcaagggttgtaaactccaccctgtaatattgctcctaatatttaggatttagggggggagaggataatattactcccaatatcgcaggggatgtatatgccctctttgatattgttcctaatatccagggggggagaggataatattactttccatatcacaaagagtgttcacccccctgtgatattgttcctaatatccaaaaaggaagaggatgatatcaatcccaatatcacaggaagtgtacaccccccccttttatattgtttctaatatccaggggaaatgagggtgatatttctctcaatatagcagaatgggtacactccccctgggatattattcctaatatccaggggaaaaaaagaggttgatattcttcccagtatagcagggaatgaatacaccctttgtgatattgcttctaatatcaaggggaaaagaggatgatatgactcccaatatcacaggggatgtaaacctgtggcgttgttgctaatatcaaggagggaagagtatgatattactcctaatgtcgccgaaggtgcacactttccctgtgatattgttcctaatatccaaaagggaagagaatgatattacccccagtattgcagggtgtacaccacccctgtgatattgctcctaatacccaggaaaaaagagaatgctattacccccaatatctaaggggacgtataccttccctgtgatattgtttctaatatccaagtggggagaggatggttttactctcaatattgcagggagtgtacactccccctgtgatactgtttctaatactcgggctgggagaaatagtattactcccaatatcgcagtgatattgtttccctgtgatattgtttctaatatctagtgggggagataattatattactaccccatacacaggggagggtgtacattcccctgtgatattgtttgtaatatccagggaaggagaggatgttactcccaatatcacaggggttgtacaccccttttttgatattgttcctaatatctggggggcagagaattatattactgtcaatatcacagagtgtgtacaccccctctgttatattactctttatattcagggcggtagaggatgatattactccctatatcacagggggtgttcacccctcctgtgatattgtttataatatctaaggggaaagaggatgatatcactctcaatatcaaaggaaatgtacacctttcctgtgatattgtttttattatataggggggcagaggatgatattaagaacaataccacaggggatgtacacccacgtattgatattgtccctaatatgtatggggaaagaggacagtgtaactcccgatatcgcagagtgtgtacacccccttgtgatattgtttctgatatacacggggagaaaagataatatttcttccaaaattgcagggggtgtacaaccccctgtgatattgtttttaatatccagtgggggagagaatattactcccaatattgcagggcgtgtacacaacccctgtgatattgttcctaatatccagagtaggggaggatgacattactttcaatatcgcaaggggtgtacattcccctgtgatattgctcctaatatccatgaggggagaggatgatattattcctaatatggcaggggctgtacaccttccctgtgatattgtttctaacatccagtgggggagaaaatgatattactccctatatcacagaaggtgtacactttccctgtgatattgttcctaatatccagaaggggagaggataatattactcccaatatcgcaggaagcttacaactcccctgtgatattgtttctaatatccagggaggtagggatgatattactcccaatatcgcaggggatgtacactcccccgtgacattgtttctaataaccagggggtgagaggatgatattacgcttaataccgaagggggtgtacacacccttgtgatattgtgcctaatagccagggggaagaaaattatattaattttaatatttatggggaaaaaggatgatattactcccaatatcacaggggctgtacaccgaccttttgatattgtttttaatatccagaagagaagaggataatattgctcccaatatcagaaaaggtgtaaaccccttctgtgatattggtcctaatatccagggagggagagaataatattactaccaatatcacagaaggtgcccacccccaaggtgatattgctcctaatatccaaagataatagggtgatgttactcccaatatcacaggaggtgttcacaccccttgtgatattgtttctaacgtacagggaagggagaggatgatattattcccaatatcacaggaggtgtatactcctctgtgatattgattttaatattcggggggaaaggatgatattactccctatatcgcagagggtgtacaccctctgtaatattgatcctaatatccagggcgggataggatgatattactcccaatatcgcagaaagtctacacaacccccagtaatattgtttttactatccagggggaagaggatgacattactcccaatttcacagagtgtgtacactcaccatttgatattgtttctaatatctagggggagagaatatattactcccaatatcacaggaattgtacaccacctctgtgacattcttgtgaatatccggggaaaaagagaataatattactcccaatattgcagagcgtgtacacccctccatgatatcgatactaatatttttttaaagaggatgatattactcccattgtcacaggatgtgtacaccccccttgtgaaattgttcataatattctggggggagagcataatattactccccatatcgaaaaaggtgtccaccctccttataatatggttcctaatatccaggatattacttaatccaggatacttgtaataccctaaatatacaattgcttgaacctccacctcccaggttcaagcaattcttctgcctcagcctcccgagtagctgggactacaggggcacaccaccacacccagctaatttttttttcttgtatttttagtagagatggggttttgccatattggccaggctggtctcaaactcctgaccttgtgatctgcccacctcagcctcccaaagtgctgggattataggcgtgacccaccgtgccaagccaggaagaggatgctctatagatttccccaataagagatggctttgcagggccattccaaaatatgtcaaagaaatacatttggggataaaatactttgatttcctttagggaatgttatctattatgtgatgctataccagagtcaggttggagtcggttatcttattgcaacaaagagtctgttccgtcactgttgggatctctattttttcctcttatttcttgagacagggtctcactctgtcacccagtctggagtgcagtggtgcgatcttcattcactgaaacctctgcctcctgtgttcaggtgattctcgtgcctcagccccttaagtaactaggattacaggtgtgcgccaccacacccagctaatttttgtattttcagtagagatggtattttgccctgttggccaggctggtcttgaactcctggcctcgtgtcatctgcccacctcgacctcccaaagtgctgggactgcaaatgtgagctattgtgcccagccaggatctctgttttaatgttagtgctggtcactttgcatgaactccaaagggaagaaatataatgaggtgtgtctgaccccctgccttctcatcgtgacctgaattagtttttcaggtttgcaggggatacccttggacaagaaggggctctattcggttggttggggggattagaattttactttttgtttacaatatttctcctgaaagagttaggggctcacaaggaatttccgcgtgagcaacttatgaggaaagccatctgggaagatatgtgtccttgtgtcactgggatattctcgtttaccccaatgatacggcaatgacgcagggttgtgaaattacagctatgtgtttggggaaaaaagaaagcaggattgtgtgactacgtttccaaacttcacttgcccttagccatagtgagttgggggcctggagattctgttttctttcacaatgatatagatacaattaaatgtatagaaagcaaaaaaataaaaaggtgagtaatgaggaacctctgattcctgagtggccatgtagttacccatggcacagagccacagttactgaaggtaaagtttgctggggaatttagaaatgaatccagctcttggaggagtcagtttactggatgcctaagaaaatgcaaacaaaataagaaaaaagggtaatattcaatcccatagttattgttacctgtcatagctaaagtaaaattaaaacagagtgctggcttcaatcttgatgctacactaagcttagatttcagtgaatgtgagtctcagccactagctcagagccacctcccaaagaccaaatcatgtagggacaatagaaagtacttctgagaattgtggttaccaagaacctagtaactgttggggaggagcaaaacaaagtacagaaaccagagggtacaatctgagtgagactgctatcagcttctggaggagcctttactaaaatgaatgatgagagtaactggatgatgagagtaactaatggatgatgagagtaagcaatgtctttggttttcttttttttttttttttttttttagcagacgtctcactcttgtcgcccaggctggagtgtaatggcatgatctcgcctcactgcaacctccacctcctgggttcaagcaattctcctgtctcagcctcccgagtagctgggactacaggcactcatcaccacacctggctaatttttgtatttttagtattttctggtgagggtccaggtttccggaaacaactcagagacatatgttaagatgttatctttagttttcacagggaaccaaatatgttacgactccaatttccttggctattgttttaagttaccattaccttctcgttgatcaagttgctcatttacttctcaagcctagctagatgcctggaatttcccttgaaggaagtcaagattttcctttatctccatactggctgatggtgatcgagtaagcccctaagaggggtccctgctccatctcgagatgctgctagattctacagtgcctaataaacagctctcgcctggccgacaaagagctgcttgctctctggatagcaattccaaagtgaacagacaacatcctgtttggaagactgccactctgttagaagaagcatcaggaaaacctttcttttgagctatttataactaacagcaattgaccaagtatacttttgtgagtgaaactgacctttctccctgtaagaattctccaaaatttggaaactatttgtgagtatttttacttatggcaatataattattggcacaagctcaatcagattcggttttctttcgtaacaggaaccattggagatactcattactctttgaaggcttacagtggaatgaattcaaatacgacttatttgaggaattgaagttgactttatggagctgataagaatcttcttggagaaaaaaagactgggtatattttcaatatgctttccttttaaggtccctcacctgtggaaagtaaagaatgtcactttctgacaggctcaggaacctcaagttatgtagggatctcaagaagatgggggaattcacccagttcatacaggtgaaattgctgttgcaaagattatgaatatgagagaagtccagcatggctgacttcatctcgtgtctggcctcaggctggctgcccttgctcactcttgggcataggccaagctagccatgggaggaatttagtttatagtttaactttgaagcacggatgataatagtctctccctaaaatgaaccccttccttgctcagggactgaaactacctttgtatgacaaatgaaagcccacaagattaagattatgagaggggcctgaattctgctaaaatgcaggtgtagctgactgataacaagtcattgtcccacagcttgcctttctataatctcttgcttctcaggagtcacatggccagaggtcctgagatttccagtcctgtgacccccacccagagatggacttagtgcatgaggaccattttccacacccctatgatttcatcctcaaacaatcagcagcaaccattccctagccccctgccttccaaattatccataaaaatcctagcctctgagttattagggagattgattaataatcccagtcctaccccttgggttgctctgatttaattaaaccttctctactgcaataccacggactcagtaaattggttttgtctgtgcaatgggcaagaagaacatgttgcatggttatacaggtactacaagcacagtctgatggcaaattattggttttgcttcctgcccttgatgtttctaaacatctagtccaaaattacttgtgaaaggtccagcaaagccaattttaaaagaggctatatggccaatcactattctttctacacattattgcaaataatcaggccacggctgggcacggtggctcatgcctgcaatcccagcactttgggaggctgaggcaggatcacctgaaatcaggagttcaagaccagcctaggcaacatgataaaaccctgtctctactaaaaatacaaaattagccaggcatggtggcatgcacctgtaatcccagctacttgggagactgagggaggagaatcacttgaacctgggaggcagagattgcagtgagctgagatcacaccactgcactccagcctgggcaatagagtgagactttgtctcaaataataataataataatcagaccaagtataatgaaattaaaatttattttgcaaataaattggtcctactacaatttatccttcatagaaatgtggaaactgaagataaaaaaaattaggtttcagaagaaaactatactacacctgttattagattctagccctaaacattgtttttgaggtttttattatttacctgcaatttggtctaaattctgaattatttcctgactacaagtatccaaggaataaatgggttttctttttctttatgatagttttagttggcttctaatgcaacaacaatttttattgtaatcctgtgtgcattctattcctactattcaaattattaatgttatagatctttcattgtagtacttctgaattaaccaaaatcacagtattctgaagatgattctacaaagcctgctgtttctacaaaggctgctgatgatttctacaaagcctgctgtagtgttgctgtggcctctgcttaaaaaagtagaaaacacattgatgcagcatgttcaccccaacctccctgcctaaaggctcagggaccatcttggaagaggaaggcgcgtgagattgtaagagccgaattagggggatggagtgtggagaataaggacacttcatcttggatgctcacctgccaaattgacttctgatgaaagccagctccagaaatgtgcctacagttactactttcacctaaaccctgcccttagtcaaatccttctcttcttctaagcaatcaacttcaattccttgtataacccacagtataaaagggcttttataccattctatcctattgcatgtaagccttgggtctgggaggtaacagtgtgggattccaccatctcatctccctgccacccaaacatgcctgctcttctttaagcaatattaaatgtttgtacttcagaaatttgatttgtcagcctcttcttcagactctcagcttctttggcctttgggagtaaatttgcataggcctgctcaaaacaggatgttctgggggtttgggggtgttgttttgttttgttttttgttttgtttagagacagggtctcactctgtcacccaggttggagtgcagtggtgcaatcatggcacactgcagcctcaaactcctaggctcaagcaatccccccaccttggcctcccaaagttctgggattacaagcataagccaccatgcccagccctggacttttctttaaagacatttacacagtgtaggaattactgtgggtgcactgctcaggtccccttctccaggatgctcattcctacctcatagatgattttcctgcagagatttgacctcagctgaagggcagtcacctggtccaggtggttgctattcacctccttcctgagaacagccaacagccagggacacgctagcacagagatataagagcgaccaaggtgaggccccttctgtgctgcggtgcatgctccagagcctccctgggatcagacttaagagggtctccagccagatctggtcttcgctgctttcctcgagctccccagcgcactcctgcaatgcatcttttttttttttttttttttttttgagacggagtttcactcttgttgcccaggctggaatgcaatggcgcaatctcagctcaccacaacctctgcctcgcgggttcaagtgattctccttcctcagcctcccaagtacctgggattacaggcatgcaccaccacgcccagctaattttgtatttttagtagaaacgggtttctccatgttggtcaggctggtttcgaactcctgacctcagttgatcctcctgcctcagccttccaaagtgctgggattacaggtgtgagccactgtgcctggcccaatgcacctcttgaatcacctcctcatgctttgcttttagagaacatgatccccaacatgtgattccagcaaagattctagaaagccaaccgtgacaatcacttctgggtttagatgacccccccccaccacaagatggcagtgagcacctcatcacagaggtgctgatggtctgcagcaccgcgccaggccagaacgtgccttttacagaagaaaataacccagtagctgactaggatggtgaggagggctggtgagcactgcggtagtgagagggacactagcatcactgagatgcaagtgatggtcatttttcataggtcaaagctcaaagcaggggacagttacagggcagggcttcatagcaccagtgtgatgaaagtatctgggagtggctaaggccagcactatgccatgggaagcaaggtgggcctgaggaggaggcagcagcgtcagcctgcaacaagtgggggctgccctgcagagacctaagagtcatgttatagagcacagtgtctgtaaggccaagaagtgtggacagccaagtgtgtcaattactagacatactcaagaggagcaggaagggcagggcatggtggctcatgcctgtaatcccagctacttgggagactgaggaaggagaatcgcttgaacccgggaggtgaaaattgcaatgagccgagatttcgccactgcactccagcctgtgtgatgggagcgggactccatctcaaaacaaaaaaagaaaaaggaaaaagaaaaaaagaaaaacctaggtatacttctcaagcaaataaaaataatcaaaaccaatatcatgcccgggcacaaatttcatatatataacagatttaaatatatgagggtgattatcctctcatatctccatttttttttgtttttccatttttttctttactaaaaaaagttaatgccaatgacacacaatttttttttttttttttttttttgagatggagtctcacttcttcgccctggctggagtgcaatggcgtgatctcgactcactgcaaagtctgcctcctgggttcaagcaattctcctgcctcagcctcccaagtagctgggaccacaggagtgagccaccacacccagctaatttttgtatttttaatagagacggggtttcaccatattggccaggctggtctcaaactcctgatctcaaataatctgcccgcctcggcctcccaagattctgggattataggcgttgagccactgcgccccgcctatgtatgattttttttttaattttattttcataagtttttggggaacaggtggtattttgttacatgagtaatttctttagttgtgatttgtgagattttggttcacccatcaactgagaagtatacactgaacccaatttgtggtcttttatccctcacccccttcccaccctttcccccggagtccctgaagtccattgtatcattcttatgcctttgcatcttcatagcttagctcttgaacccttactttctgtttgagggagaagacatatcatctacaagtagatactgtgtaaacattccattgcatgactatcccataacttatttattatttgtgtttggttatttgctgctatgtaacaaccccactcccaactaaatggtgtgacaattccatgattctgtggatcaaaaattctgaaaagtcaaacccaaggagttttgtctctgctccatgatgctaaagcctccgcaggggtgaggcgaatggctcagggtgactgaaaagctcagggttggaacagctggggatgaggcctctatgtataagatgattcttcactcacaggtctgaaactatggtggggacagccagaaggctcggctcagctgggacagtcacctgagccctacacatgacctctccaacatggtgatcctgaagcagttgggtttcttacacagcatcacacttttcttttttttttttttttttgagatgaaatattgctctatcacccaggctggagtgcagtggcacgatctcagctcactgcagcctccgcctaccaggttcaagcgattctcctgctccagcctcccaagttgctgggattgcaggcgcctgccaccaagcccagctaatttttgtatttttagtagagacggggtttcaccttgttggccaggctagtcttgacctcttgacctcaggcgatccgcctgcctcggcctcccaaagtgctgggattacaggcatgagccaccgcgcccggccaaagctcacacttcttatgattcagccttagatgtcacatcagttcattttccccacacttattagtgttagaagtcacaagcccacccatactcaggggactggcacacagaccccactctcaatggaaggggtgggacaccaccattcctgctgatgggcatttgggtaacttcctgtttgaagctattaagattgggctgctgtggccgggcgcagtggctcacgcctctaatcccagcactttgggaggccgaggcgggcggatcacgaagtcaggagatcgagaccatcctggctaacacggtgaaaccccgtctttactaaaaataccaaaaaaaaaaaaaattagctgggcatggtagcgggcgcctgtagtcccagctactcgggaggctgaggcaggagaacggcgtgaacccgggaggcggagcttgcagtgagccgagattgtgccactgcactccagcctaggcgacagagcaagactccgtctccaaaaaaaaaaaaaaagattgggctgctgtgactattctagtaggtgtctttggtgagcgcctacacgtgtttctctttttctctttagtatatgcccaggaggggaactgctggctcccagataccgtatgttcagggtcacacacacttccacagggttttccaaagcccttgtaccagcacgcactcccagcacctgtgtgactgctccagctgtcccacagtctcatcagttctattgctgatattttcattttagcttaagttatatttaataggaaaattaccgttgcctctgccccccgttcctgcctgtaggagtttctcgtagctgttgctacaggtggccacaaatctgtcacttaaacccacacaaattgatgtccttatggctttggagtcagaagtgtcaactgaaggtactagcagggctgtactgacctggtggcctcagggagcatctgtgctgcttctccaccttctagaggctgctgcatccctcgctccagccccttcctgacaccactcaccctcctacttctgttatcacatcctcaccttctctgtgttcagggctccctctgtctctctcttgcaagcacacttgggattccattgagggccacccacataacccaggagaatttctccacctcaatatccttaacaactgcagagcccttttgccataaaagttaccattcacgggttccagggattgtgacatgggtagctttaggagtgattattcctgcctgtctcccgctcaccagaacttggactttctctctcaacaggagccccctgtgtgggaatagcctgtctcaacgacgccctctataaggacctgcttcctcaaaggacctcatagtcgggtcctgcccctcagtgtccagtctgccttggctggaggggctgcaggggtgtgttggcgccacctggtggagacagggcatcacagcaggtgggagcccagtagaagcacaaccaaaacatgggtaatgtttaaaattttctggctaagcgctgtggctcacgcctgtaattccagcactttgggaggccgaggtgggtggatcacatgaggacgggagtttgagaccagcctggccaacatggtgaaacatcccctctactaaaaaatacagaaaaattagctggacatgtggcgcgctcctgtaatcccagctactcgagaggctgagacacgagaatcgcttcaaccccggaggggttgccgagatcgcgccactgcactccaggctgggcgatagagcgagactctgtctcaaaaaaaaaaaaagaagaggggaggcgaggggaggggaggggaaaagggggaatttgtttggagctgagacatccatcttctcctgacctcagatatttgcactcctggttatgaagccttcacacttggactgaatacaccaccagctttcccgatttccagcgtgcaaatggcagatcgtgagacttctcagcttccataattacatgagccaatttatatatataaattgggtcctccagaaaaacagaataaattatatatataattatacgcataacttaattaaattatacgtataacttagctatatatataatttattctgtttttctgaagaaccctactgacacaaatgttgagcatcttttcatgtgcttattggcttaataacttgtacatcttctttggggaaatgtctattcaagttctttgcccattttgtaactgaactattaatatttgtctttacattgttgagttgtaaaagttccttatatattctagatactagagccttatcagatatatttctgcaactattttctcctaatatataggttgtgtttttattttctttttctttttttttttattgagacagtctcactctgtcacccaggctggagtgcagtggcatgatcttggctcactgcagactcgacctgccaggctcaagcaattctcccacttcagcctcctgagtagctgaggttataggcacttgccatcgcacccagctaatttttgtattttttagtagagccgaggtttcgccatgttgcctaggttggtcttgaactccctgcctcaaagcgatctgtcagcctcagtctccctaagtgctggaagtacaggtgtgagccacagtgcccggccatctattttcaatagtgttttttgatgtacacaggtttggaattttgataatgttcaattcatccatttttttttttttttttttggttctttctactggaccaccactcttgagccctctaatccaacctccacgcggcagccagagggagctctctaaatgtaattactctttccctgctccacctgctcaaaacagtgtcacatttgtgatttaaaacagtatttctcaaacctaatttgcaaacaaagcaggtggaactcttcttgtatgcacagcatctgatttggttggtctggcatgggtctgggagtgagcacacctaccaagcggctgctggggtaacttgcgttttccactgatgatttcagcaatgtttccggtcccacatgctcctccagaaccttgtactcccccatgaaaaggtggagtccatttccccttcctttatttatttttttgagacgaagtttcactcttgttgcccaggctggagcgcaatggcgtgatctcagctcaccgcaacctccgcctcctgggttcaagcaatgcttctacctcagcctcccgagtagctgggattacaggtatgtgccaccacgcccagctaattttgtatttttagtagagacggggtttctccatgtcggccaggctggtctcaaactcccgacctcaggtgatccgcccgcctcagcctcccaaagtgctgggattacaggcgggagccaccgcgcccggctatttccccttcctttgaacctgatcaggacttgacgatggcatcaacatggtgagagtgaccctgcatggcttatgaggctgggttacacaaggcgatgttgcttctgactggctccctctcaggatacatgcccttggaacccatcctctaagctccttgggagcccaacttagcccatgtggagacaagacagggagagaaacagaggcacccccagccctcagccagcatcaaccgccagacaggagagcaaatgcgccaacaatgattccagctgaagcctcagacagcgtggagcagagatgagggatccctgcagattgcagatgcgtgagcaaaatgcatgctgtcactgttttgaaacaacaatgtctgggggctgtttgttatgcagcaatagacagctgtaacaatgctgttactgctgtattccatgaatgactgcactttgagtagcagggggctagatcactagataagccccatggcttctgtgtatgctatttttctacttttatatccttttcattcactttttttttttttttttttgagacagagtctcactctgttgcccaggtgggagtgcagtggtgcaatcttggcggactgcaacctccacttcccgggttcaagcaattattgtgcctcagcctcctgagtagctgcgactatagatgcacccccatgcctggctagtttccgtatttttagtagagacggggttttgccatgttggccaggctgatctcagactcctgacctcaggtgatccacccaccttggcctcccaaagtgctgggattacaggcgtgaaccactgcacccagcctcattcactttctttacttggctcatttttccttgttgcctcaattctcctctaagatcactttcctgacatttcagcctgggcctgttgccttctctgggtcccctccgcctcctgtgcctcccccatctcagccttgatccctcagattatacttcctctgtccccaccctgaccatcttggctgtccctggatagggatgggtatcttctcccactggtctgggagatctggaaggacaggcctggaaaagacttggtcactgctggaaggagctcagttagtgtggtgctgaggacagtacgggtgaggctggccccttcacccaaactcccactctcttccatagatttcacctctgtggcccaggccataggattagggcaactccccttaaacatcgagtccatcctccaagctgtccttttttttttttttttttttttttttgagacagagtctcgctctgttgcccaggctggagtgcagtggcgcgatctcggctcactgcaagctccacctccagggttcactccattctcctgcctcagcctcccgagtagctgggactacaggagcctgccaccacacccggctaattttttgtatttttagttgagacggggtttcaccgtgttagtcaggatggtctcgatctcctgacctcgtgatccgcccgcctcggcctcccaaagtgctgggattacaggcgtgagccatcgcgcccggcctcatgctgttcttgaatagtgagcacctgttacaagtcgccccaccagcctctcacttgtacccccctcatctctttctccccaagagacagaggaccctggcacttgtgaagcatgacccagaccctggggccatggcatccaacatcctcattccccatgacccctactgtctagatgtagctgccaagagacccccagactccccgggcctctgtctagagtgccaagacagagagagaatgccctgccgcttgcatgctttgtggggtgtccttcccccttccctggctgctaggcgtgacttcaacgttctccccaacccccaaacagcagcactgacaccagctgcagacctggctcaggttagctaatgaggaccaggctggggatggagcctgaacccctaaaccccagtcctgtaccccaccctaatcctggggtctccactggacaaaacgaagcagcttggtttttcgttgttattgtttttgagatagagtatctctctgtctcccaggttggagtgcagtggcgtgatctcagctcactgcagcctccgcctcccgggttcaagtgattcttgtgccgcagcctccccagtagctgggattacaggcgcgtgccaccacacccagctaatttttgtatttttagtagagacagggtttcaccatgttggccaggctggtctgaaactcctgacctcaagtgatttcccagcctcggcctcccaaagtggaagcggcttatttttaaggagaaaactcccgtggaaaggaatcagcacctcctctgtcaacatttcacttctctgaaaagactctcacttccaacagaaagtgctttgtaacacaacaatgaggctgggcgaggtggctcatgcctgtaatcccagcactttgggaagctgaggcgagtggatcacgaggtcagaagttcgagaccagcctgaccaatatggtgaaaccccgtctctactaaaaatacaaaaattagttccgtgtggtggcgtgagcctgtaatcccagctactcaggaggctgaggcaggagaatggcttgaacccaggagatggaggttgcaatgagccgagatcacgccactgcactccagcctgggcaacagagtgagactccgtctcaaaaaaaaaaaaaaaagaatgagaacatatggacacagggaggggaacaatacacacaaacaaaatttagaaacaggtgaaaataattttagtaatatttttactaatactgatatgctcaaaatattattatttcaataagtaatctaaaaattattgagatgtcttatgttcttttcatcatactaagcctttaatatttggtgtgtattttacactcacagcacatctcaatttgcagtccccatgtttcaagcactaaataaccatgtgtgtccggtggctaccatactggacagcgttgatctgaaatcgcatctgtatgcatcaccagcatatttgcagagatccccatctcagcagcacacctgaggctcatctgcgaaagcacctgcaacttctctacaacctcccacatcacctccaaacacatcctcatgtcatctgcaaacacacccatagctcacaggccaatgcctaaatatcattgcaggcaccttcagagaaagcacttactaaaggggtatacttgattccacatctgctttgacctgcaaatctcccttctcctttacatacatttgcatctcatttgtatgtcaatctaaatccactggcagagcctcagatcatcatctcaaagtcaggtggatgtggggctgggcaggcctccaggtgttcctcctcctgcttcctctggggctcttgatcctcctcctcttccttgctgctctcctcctcctcctccaatatggtgaccagttcctcccgcagcgcccccatctccagccccaggctgcacagctgtcccagcagctggacatccactcggcgcaggttcccctgccagtaggaaggggacgtcacagggatgccaccccagagagcaaggggtctctccaggacctgggtgagagcaggtcccaactcatgtcctggccacagcgcctgggcagggtcctcactgtgcccatggaccctaactgccttcctgcttctcagagtgtctcttgatctctaactcttctctttgtctctccatttcattgtccctgacttctctctctctgtctcctccctctcttatctatatctgtccctgtttccctttgtctctgtccccatttattttttgtctttccatgcccctgtctctctgtctttatgtgttgccatttctctgcccctgcctttggctctctttctctcgcttgccctctctctgccctccccaactttctcaaattcagtctgtctctccatctctgttcctgctctccgtctctgcttcccacctctgtccctctcttttgggatctccctgtccccacctctgttcccgtccctcactctatgtctgtctctcggtgtctgtacatgcctctcatgtctctgcttctatctctcagattctgtttttcgatctctggccttctctatttttgttcatttccattcattctcatttcctctctttctctttcccttccaaacccctcactcaccagctcctccctgatccacagcagactatcgcaggcacctccagtgtctgcccctgcagtcctgagggtctgaccagggatttccactggggagacctccctcagggcctgggggggtgggcccagccccggaggcaccagtccagcctgattcagctgcctccacagttccatcgtctctgagctatggctgcaaggagcaggaagtagcaaggtccagggtggcctggtcccctggggagctgtgtgcgtggtggagagtaaagggcagagggagtgggatgggggttcctgggaaaggtatcccaaagtccactcttcagagagaatcagctggccttgtgcttttctttttccttctgaagtctaacctcaactctgctcacagggttcaaacatagcctcttgcagaggtctaactccacccttccctgcctgtctcaggcctgacccctcaggggcgctcagtgtctgtagatgcctggcaccctctgtccttccacctgccccccaccaccacttctccagcctctcctcagcctccatttgacctctggcttgcccatagcttggtccttgcttgtcctcttggcacgggtcatcctagggctttcccaccagtgtgcctttgggggcaggaatggctcccaggggcaccaagacagcaatcccttagctggagtgcctgtgtccaggctgctggcctagggccaagcagccaattctgctgaccctggacttgcctatgggtatattatccctgttgagggtgagggcttctgctgtggaaaagtctgggaagcactgcaggcctctctcggccttggacccttccttcagacccaaggtgcatatatatacatatatataatggtagatcacgaggtcaggagatcaagaccatcctggccacatggtgaaaccccgtctctagtaaaacacaaaaaattagccgggcatgctgccgcgtgcctgtagtcccagctactcgggaggctgaggcaggagaatggtgtgaacccaggaggtggaggttgcagtaagccaagatcacgccactgcattccagcctggcgacagagcaagactccatcttaaaataaacaaatgaacaatatatatatatatgtattttgttttttgagacagagtctcgctctgtcatccaggctggactgcagtggtgcaatcttggctcactgcaacctccgcctcccgggttcaagcgattcccctgcctcagcctcctgaacagctggggttacaggtgcacgccaccacacctggcgaatttttgtatgtttagtggagacggggtttcaccatgttagccaggctggtctcaaacccctgacctcaggtgatctgcccacctcggcctcccaaagtgctgggattacaggcgtgagccaacgcgcccagccccaagtcccttttaccatagaaagtaacatagtcacagtgcccagggattcacaggtatggggagagggttcgttattcagctgccacacccaccttcctaaacctgctgcccttccagtttcctcacgtgcacagccacgcccgtctgcttttagtttctcaatctgttggcttaaccttcaaaacaggcccaggatttgagcacttctcaccattccctctgccccatccccattcatctcttgcctagactgctacagcagcctcttttactggtcccctgcatccacccttgccctctaaggcaagggtccccagtccctgggccaaggaccagtaccagcccctcgcctgctaggaactgggccgcacagcaagagatgagcagcgggtaagtgagcattaccgcctgagctccgcctcctgtcacatcagcagtggcattagattctcataggaggcaaaccctattgtgaactgtgcgtgcgggggatctaggttgcctgctccttatgagaatctaatgcctgatgatctcaggtggaacagtttcatcccaaaaccatccccaccccacccccgacccccagtctatggaaaaattgtcctccacgaaaccagtccctggtaacaaaacggttagggaccgctgctctaaggtacattctccacctggcagaaataatctttacaaaatgtaaatccgattttgacactcccttcttcccactgtgaatagaataaaaccctaccaggcctgcaccgtcagcccctgcccacctctcaacccagtctcctatctctgtctgcaagctggttcccacctcaaggcctctctgctctagaggctacctctccctgcagcgcttttcccctagatctttgaatggctctttccttatcattcacttctacttcaatgtcacctcttcagagaggcctttgctgatggccctacacccagtcacttttttttatctgcttctcatcaaaattgccttgctgattcctttgtttcttattcatcctctcccacatccatcctctcccagcccagaatgttgacttcctgagagagggactgggtctgtcctgctcaccatggtaacctcggcatctagaacagtgcctgccatcacgtggtaggtgctcagtaaatattcttggaactaatgaatgaataattctatccacaagacttcacaatggctcttcatgctgcgatctagctttcaactccaaactggtcttgagatctcacctcagtctctaaccttgacatctaacctcttcacccactctcttacctgaccctaatttttaaaaatgacgtggtcagcttttcagccccctcattccctgtttttaggaggtagtgagtggaagctggaagaataagaaagcttggggagactgcaattgcagtcaggaaagaaaggtactctgccgggaagaacaccccatcttctcctagggaaagattgtggagtcctggggtttgttttgtttttcaattttttgttttaagagacagcgtctcgctctgtcacccaggctggagtgcagtggcgcaatcacagctcactgcaacttcgacctccccggctcaagtgatccccccgcctcagcctcgtgagtagctgggaccacaggcgtgcaccaccacgcccggctaacattttattttttgtggatataaggttgccctatttctttgtggagataaaggctcccctatgttgcccaggctggtctcgaactcctggcttcaagcgatgctttcgcctcggcctccacaaagtgctgggttcacaggtgcgtgagcccgacctgtgtctcgttttgaagctcagggagagggcgctgtgagcaatccctaaaccctttaagagtaaaaagtgcgtgcacctttaagaggacggttagaaaacgcggggcgtggccacaggagaataagttcgcgctgaaccaggagcgtgggataagaccggccccttccggttacgaaaccttagcaagatggcggctccctgggcgtccctgcgcctggtcgcccccatgtggaatgggcgtatcaggggcatccatcgcctgggtgcggcagtggccccagagggcaatcagaagaagaaaaggacaatactccagttcctgaccaactatttctacgatgtggaggctctgagggattacttgctccaaagggagatgtacaaggtgcatgagaaaaatcggtttcgagacaaggagtggatcaggccagataagtatggccatttctctcaggagttctggaatttctgtgaagtgcctgtcgaagctgtggatgccggtgactgtgacatcaactacgagggcctggataacctcctccgcctgaaggagctccagtccttgtcgctgcagcgctgctgccacgtggacgactggtgtctcagccgcctctacccactggccgactcgttgcaggagctctcgctggccggttgcccccgcatctccgaacggggcctcgcctgcctccaccacctccagaacctccgcaggctggacatctcggacctccctgccgtgtccaaccctggcctcactcagatattggtggaggagatgctgcccaattgcgaggttgtgggagtcgactgggctgagggcctgaagtcagggccggaggagcagcctcgggacacagccagccctgtccctgcctagcctttagccctgtccccactcacgtggcttctcagcgggctgcatggaatgtctggtagctcaccacacttctggcttccatttgtcttcactcaacgtcagggtgggggagtggtgctggccaatcacaggagagagcgtgagttcccagtatttattcctggctgcccttggctaaaggtcacagctcctgtcaccctgtcaggcagccctttccatgcccctgttcaggcctggggaggtaaaggctcaggctgttagtagccgcagagagccacactcaccttgtcaggagactcttctcaaactgtccttatgtgagtgcactgccatttcttgcagggaccctgactgacacaggggctactactgacactttacagggatggttctcccccgtgcagggccgctgtgcccactgcaggacatgcagcatccttcgccccactccactcactaaaggccagcgcaccccaggccccatagtattgctggttatggatttattgactttatgttccaaattcagctttttcagttggctgttttttgaaaggggataagctttgtcagtagagggcaccgaacaggcattataggaggaaaggcgcctccttcgtggttcttgttggcctccactgaggcacctctctgggaataacgttccccagcaccccaaatggatttccagtcaattcagaagcattttaccagtgaagccctcattattccagttcactgttaaagccagtaattctctatattaaactttccctgttcggtttatactccggagtataaaccgaacaggattatattatctgaagctccccttttgggcggaatgtg

SEQ ID NO: 735326 - DNA, 188219 bp, Homo sapiens
ctccaaggctgagggatgaggagacctgctgaggacccagggccttatctttccatcccactccataggtcccagtattgactgatgctgtcttcacctcctagcctcacttttaaccttctggcacccgcccaccactgtccagttcactattgaagccctgccgtccagtgctgcagagggaaaggatgttcttctactggcctgcaatatttcagaaactattcaagcctattattggcacaaggggaaaacggcagaagggagccctctcattgctggttatataacagacattcaagcaaatatcccaggggccgcatacagtggtcgagagacagtataccccaatggatccctgctgttccaaaacatcaccctggaggacgcaggatcctacaccctacgaaccataaatgccagttacgactctgaccaagcaactggccagctccacgtacaccgtgagtgattcccccatacctctgggtgctggcggtcagttctgcttcacacacatgagattgtcaggcctgggctgtgcctgcatccccctctgcattttgtcccgtgttgagatttgggcatttagtgcaggacacacacatggtaggtaaacttcaacagatcagaattcctttcctgcatccaggccctgcagacactgatggcgggggcgggggggcctcagcagggggaggtcagtctcagccaagcaccccatgccctccccatgaacctgaccctgagaaagaccctggagaactgggtcagggcctggcctgagggcgtcctgggaacctcacaaaagcccagcctcaggactcctgactccgtgtgaccccgggaagcctgtgtcagggctggggtgtggtctcctgggcagggcttactgggagcaaggatttaccagatgtctgcgggctgtggttcctgaagcttctcatcagtgagggctcagctcccagagtctcatctagacaaggacagagcctaccactttccctgggactcagcctggagagggcagggggacaggattactagggcattggccccctgaatgaggagcttaagagatgcccttgggcagtcagtggcccaggggtaggaacagaggggagaaaatgttcctggcagcttcttgtccaccggggatcatgcccaggggtgctctcccatggaggcaaataacagatgctgttgatgtgaacacctcctctgtgccaagcttcatgtcagatcctgtgaataatttaaagttcattcacagacaaagtggcaagcctcagaccattttccatttacatattgtatggaggggaaactgaggcacagagagatacagacaccggccacggtgggcagatcgcagctggcagagtcacatgagggctgtctgcagctgctgccacgtcctctccttcatccctggtgccttactaggtgtctgtggaccttagaacagccactggttcggatgttttcttcttaggtgtctacagctcggagggggagattctggtctggagagttatgagtaaatacagaattaatcagttttttcttaactaaatcacctgcctcaacaatcagtcagtgctggggaagttcaggcctcctcgctcaggtccacaccccgcatctctggacatgaaatggcttcgtgtgttttctgatgtgtgggtatcattccaacaggaggataaaggggaggactttgctttctctccccattcacaccctgcaccagccagggcccagtgtgagacacatactccgtagttctctcatgaaggagggagggaatgaatgaaggaatgatctataacctcttcagagacagagacctggatacaagatcctaggaggttctgggcccaacgtgagacacacactctgtagttctcttatgaaggagggagggattgaatgtaggaatgatctataacctcttcagagacagagatgtggatacaagatcctaggaggttctggccacacctgttttctgtccctctagagcctaagacccatgtctcattcatctggcccgtttctcctaaatctgcccctgggagctgagtctcatctgaccctggggctgcagggctgtgggaaggttttcaggggagggatcaggcttgcgggtagtcccacacgtttgccttacaccctggagctctacctggttctcactatgaatatcccataataatcccccctatcctttctggggagtagaaaaaaagtaaatatttaaaaatatgccagagcatctgttcttcttagcaagttcagatagttattagttagcaggaataaatcgttattttaccagagcctcacctgctgggggtttatgggagcctaactgactgaggggggtgggaaatatccaactccagccccctctagccatcatgtcccacctaaaggagagaaaaaactgagaggcacttgtgacattcacagcccagggcacagactctatccaggaccacagaacccctccctccccccactcaccaccgcatcactgaacgcctgctcacccaagttcctgttgcccagtacatcatgtcctggctttcaacaaaaactacaagacagactagaggcaaaaaaaaaaaaaaaaaaaatgcagttcgaaagacagaacaagcatcagaaccagatgcagatgtggcagggatgtggcagggatgttgaaattatcagaccaggaatttaaaacaactctggggccaggagcggtggctcatgcctgtaatcccagcatttgggaggccgaggcaggcagatcacctgaggtcaggagttcgataccagcctggccaacatggcaaaaccccgtctctactaaaaatacaaaaaattaggcaggcatggtggtgggtgcctgtaatcctagatactcggaaggctgaggcaggagaattgcttgaacctgtgaagcggaggttgcggtgagcctagattgtgccactgcactccagcctgggcaacagagcgagattccatctctaaaacaaacaaacaaaaaacaatactggctaatatgctaaaggctgcaatggaaagcatagacaatgtgcagaacagacggatgctgtgagcagagagatggacaggctaagaaagaataacaacagctactatatctatctatctatctatctatctatctatctatctatctatctatctatatatatgtatatatatgctagagatcaaactcactgtaacacctggatctcagagtggttgtgaggatgtttattaggagattaaagagattaaagcagagttatacacagggcgagagctcaactgatgctatcaactagtattcttatttttttgatgttgttattggcaataaaatcaggaacaatgcagtaaaaatttggttttatcatgtacgagttctgtgaccttccttgacttactgaggtactgtaagtctcagattctaactctgcagatggcggtgatgcccctctccctcaaggtgatgtgaggatgagatgagctgtaggtaggttggtgcccactgtgcctggcacatggaaggcccctgaaaatagtcaatgaacatcatccccgctcatcagcatggagttgacagtgagggctcgctctctgtgacaatcatggaatggaaaagaagaaacaagaggaagactgggcgcagtggctcatgcctgtaatcccagcactttgggaggccgaggcgggcagatcatctgaggtcaggagttcaagaccagcctggacaacatggcgaaatttcatctctactaaaaatataaaaattagcctggcatggtggcacaaacctgtaatcccagctacttgggaggctgaggcaagagaatcgcttgaacttgggagatggaggttgcagtgagccgagattgcgtcagtgcactccagtctgggtgacagagcaagactccatccaaaaaaaaaagaaaaagaaaaaagcaacagagggaagaggtgtgacatgagaggaagaagggatttaaaggtacaggagcagggcgaggtgcaagcacctgtgggagaatgtaggagttggtacatcccagtgtgtcaagtctgagacacagaaaatggtgcaaccgtggagagcaagggagtcagctatgaggacagcccaacagaccacactcaggctctggagcatttccttcctccctgactatgcccctgccctgcaatgccccttatggtttcccttggaacaaacttgggccttgtcccctttgccttcccctttctgcagaaaacaacgtcccaggccttcctgtgggggccgtcgctggcatcgtgactggggtcctggttggggtggctctggtggccgccctggtgtgttttctgcttctctccaggactggaaggtaccgcagcttttccccagcctcctcccacccctaggctgaccccagtcagggaggagggagaccccgccctgtattcagggccaggctttccgcatcctcccaaggaatccttccctctcattccatggctcctcccttgccagctgctgatcctaggctgcctcttcctttatgaatgtggcacagttaaggttgcacccctgagtgctgtcctagttccctaacacagcaaagccacagctgcctggagggaggaagggagggagggagggagggagataagacgggagtgctcagaacctggtaccttctgctgttcattgaatttacccacccagtgaggagggatttgcaggcttgagatccatggtgggggtcctgggcatggtcacgcagtggggagtggcaaagcctggacaggctgggtagggtcagcaccccatcgtgattgatgtccctgaggtgtgagatgggagaacctggacctcaggacctgctgtcctttatgtctcttgccaaggggtggagagagagaggacaaggccattgccccatttcagcatctccaggcctgaaaggagggtctggccatggcagggatactgagttctgggagaatatgatacatgctccttgcctccccatgcccccagctcccccagtgtcctgcacacacagccggccctgctttccctctggggccttgacccttcctctcaggcaaacgcaggtggtctgattccctccctgagtcctcagtccctttcctgggtccctgggtcaatgttctcctcacccggcatctgcctgggggggtccttcctctctggccaggacagacgtgactgcttaaggcctatcctcagctccccgtcctcggccgctcctaccacgaaactgatggagacaggaggccttcactccagtccttgaaaatggagtcccttccttgtcctttattctgcccctaaacctgtgatttctccctgcaccctcatgaataatcctgacctttcctagggccagcatccagcgtgacctcagggagcagccgcccccagcctccacccctggtgagtgtcccttcagcccaggtgtgggagcccctaggcctgccctacggtgtccactcctgccagtcaccccctgggggcctctgaccctttctttggggctgcaaggaggatgtcaggaaacatgacacaggggaccccgactgtcttgttcagactgatctgtgggctctgggtcgtgggtcacctcctcgacctcagctgctcaggtctcccctgggaagaggctccctctccctgattctctgggagctgaggacccctacactctcctgcaggaggggcccaggctctcctcccaccctgctgctcactcctgtctctgtccccaggccatggtccctctcacagatccaccttctcggtaagcctgttccctccccagcccttttctactggggtcccaacagtgcaggctcagggcagggggaccatcaaccccacagcacagcactgacccacctttccccagaacagtcaggtcaaagtgagtgcctccagccaggatccgggcctctctacagggccaggaccacccacgccatgtgctgacccctccccgggaccctctacacctgaggagaaccctggagtccagcaggtgcagaatggacactgggaccatcagtcagaggcccacattaacaagggtgcggggtgggcccagccaggacaggggtcagggtgttgtgtccacactgggaggctgagctcaggggcagagctggtcaatcctgaggggaaatgagtggaagtggaggcagggaagtaagtcctggccgatcagagacaggaaccttccaggctgggcttccgtgaccctccctccctgtcccctgacatctcctctctcccctgcccaggcccctctacccagccccagaacagccactcccatctatgaggtgagtgtgggccatggatgttctggtcccgcaggctccaggggacccaggatctgcccccaccagcacctggctgagctcagattcaggaaaatgcagtgaaaatgagaacaggtggtggtgagcagaggagggaggggcctgggaacagggaccccctgagcacagccaggttcagccccagagaagccctgggtgggcccagagcctgggagatgccagacactgttctgagaaggctacaggggttgaggcctcttctctgtttttacaggaattgctatactctgatgcaaacatttactgccagatcgaccacaaagcagatgtggtctcttaggttcctctgggagctgctcttgtgggttgatggagcgtccccaaagctcccagccctggggacggggaaggacatggagcctgagccagagaaccagctctgagtcctgaggagacacaggcctggggacagggagggatgggagtccctgctgaatatctggagaccctgacaggttgccctgggctctgggtgggccgggacaaaggcctctcatcaccacaggaagcgggggcttgcaaggaaagtgaatgggcctgtggcccacccggggtcaccaggaaaggatctgaataaagaggacccttcctctcattggctctttttctgctcacgggaacttagcagaaactcacctgaaactccgtgtccattctctcccgggtcacacagggaaaatatctccaccttgtctcaaccacagtctctcttccctgggaggcagaaataggggttgggagtcaggctggggtgggccctacacaggaaagggcaagattcacatgagccctgcccagccagccgagcgctcagctgtcctcacactaccccagggaccaaggccatgcacagccccagcctgggtccctctgtgaatgcatgtggggtctcaggagcacagaagatggggccatctgatgtccacaaaaggtgagcaatgcgggagcaaccatgggtggtataggttgcggctgtggcccctacgcagcctccagtgtcctgacccctgctgccctcttcacccaggccctggaggcccagtctatcactgtcctccacaaatgaacttacctgtccccaaatccaggatcctgtgtgcttatacctggccactaggttctcctctgtcccagtggctactgctcaggacatctttatccctggtggggcacagagaggggctgtcagagcaaccaagattaatacagacgcataattcagtccttgagcactacccaggactctggcccctcattgctcatcagttcccactttaccccctggcatggatctcactgagcaagccaactctttacacaggagcatccaggtcagaggtgcaggactcccccatctaaagctcatgcaggctcccatggcgatgggacaacctgtctgctcctctccctggcccacagccctatctcgcctgcagctcctccacacacctgggacagcagttctcagcccttccctgagggcccctggaagggtgatgatctcatataggttcacttgaaccaggtgccaccttcccacaagtgagctggtgcctgcactaaagcacagagccacagttcccaagagtgttctgccactgccacaggtcccaagagtgttctgccactgccacaggttgttcgtcctgagatgagaggtaagaaaacaacccgcaatgggttgttttatatcgggatttgcatcaggatttagctctaaatgacccctgatcccacctgcacacagcgtcagatgagacaaggtgaggcctctttagttttctgttgaggctgtgacaaattaccacaagcttagtgacatagaaacctgaaccaaagtgcccacatggctgtgttctttctagaggctccagggaagagtgcatttcctctccttttccacctcctagaggcctcctgcaaccttggctgtgtcctctttctccatcttcaaagccagcagcacagcatcttgaaactattctgtgccctgcttccatccccacatctccacctcctcccacctccctctctcacttaaaaggaaggagccttgtggttattttggacgcacctgggataaaccacaacaacctccccatctcatgatccttcctttaatctgtaaagtgtcctttaccacgtgacatgtccacagatctggggatgaggatgtacacatctttgagaggcccttgttctgtccatcactcctctcaaggccatcttctcatcatcgttcactacaaactacacatgggcacctggatgggttcatcatgactgtggcgtcagttcctgcattaacatccccagcaccctccagatcctgagagagggagacggagggctctccatgcccctagtacctctccaccttcttcttggtgacatgcttagttgctaagaataacagaaagcggaggtgactgaaagatcacaactcaccggcccttcaatagttcgtggacatcagcaccacggacagtgactcagtgaggctaatttccaggtggcagcagggagcatgcagataggagggaactgcaggaaaagctgcccattctattctatatgagaaagagtgtaagaaagaggaagctattacagggataatgctattcttctctaatccataaattgcgaaacctttgcatgtctggatatcatggtttttagcacatctgctgccactccctgcagggctgattgctgcatccaggatgtggtctcttggggggctcacagcctgctttggcctcatggtgagtctccctgcccctgacactcaggccactgtctctgcctacaacatggtgggaaccttccatgattaacgtctgattctctgtgcctgacctttgaagcacatccatcactcagcctggagcatccgctgagctcagcatcctgctcctccatccccagctgagcccttgaggagatgcttgagaggatctcctgggctcctctgtgagctcctccaggctgagccttgtgcttggtgtcagaggcctttgccatctgcttgttctttccataggcaaataatcctcctcagggacaagtggggcctgaagatctgtctgaatatctatctatctatctatctatctatctatctatctatctatctatcatctatctatatgtatgtatatatgagaatgctttattaggcaaaactgcatactatgaacatgctttaaaatgcaacaggatgagatgtgaagacataaagaacaagtgtgtagtgacacatggctatcagaacacactgaagaatccacaccgcggccgagagcagtggctcacgcctgtagtcccagcacttttggaggctgaggcaggcagatcacttgaggacaggtgttcgagaccagcctgaccaacatggtgaaaccccatctctactaaaaatacaaaaaatttagccgggcctggtggctcatgcctgtagtcctggctgttcgggaggctgaggcaggagaattgcctgaacctgggagacacaagttgcagtgagctgagatcgcaccactgcactccagcctgggagatagagtgaggctccatctaaaaacaaaacaaaacaaaaagaatccacactgcttccccgcttcactttacccagaaaaggaatgttctaggccacttcctcttcagcacacatccccagggaactaaaataggttcacagtcacccccatcttcctcattcccatcacctcttacccacagaggcatctctggtcctacagatccagccctgccttcaagaggcacaggtccaacccatccagtgtccctgctagtcacacacagcactcagggtacaatggagggcttctgtgctttggatgggaacaaaccccacctcacattcccacacctgagaagccaccagggtcctctctgtcctgtcctcacactcaatgtctgtcctgggtcacccttgtcatctctcctggaaataggcatggctcctgacaggtaggattgaggctttgtcttttcaggagtccctcccactctgagcacatgaaactgctcagctccatgcaaccctctctcaccaggggccttgttctctgggtccctgaatacctgggtccatgccatgtacattttaagaaaaatgacagtgactctcaccctgacatcctcacccaaggcacgtgtctgacaagaatcaccaggtgagatacctgtggctccacacacctgaggcttcactgcgcaggggtgtcctcatccctctcctcccacccctagggacagtaagcaccacaggctgccttggaccaccagctccccctcccagacacagcctcagatctatactgacatgctacatggagaggctctgatgaacagcaggtattaggaaatcccaccgaaccaggtgccacttgcggccccactcctcctcatatctgtgactgggacagacacacataacacacctctgttcaccgcccagcccccaaggtcaatcacagtctgcttctcccctagatccactgctccccatgtcttccgtcctcagctgcatcctgggtggcctccttgctgttcttgtaccccagaggcaggttccaacctttgtgatgttgcctgcaatgcccaaactttcccttccccttccccttcccttttcccctcccccttcccctccccttcccctccccacccctatcccttcgtcttcccttgtcttcccttcccttccctataaagccaaacatacccatccacctaccttgtggtcaaagtcatcagcctcctgctccactcagtgttctctgaccctgcatatggaggtggtggcccctcctagaacacccaccactcactgtcagccttgcgtggtaatcacagattttgcaggggttacctgtgttcaggtgtgtcacctgtggaaccagaactcttggaaggactggcagagggagctgcttaggatatctcagggctcctggcatctggtctaccacagggctattaacaacagcacttagggacaaggtggaggatggacggttaagagggtaaatatggatgatgtgtgggcaaagaataggacacaggaacacatgcagtactcaaataattatgccaagaaaggtgaggacatggagatggacattcccatatacttctgatgggactgcagtttagtccctacagcaacattgacctcatcatgtttaacgcgcacacgctctgaccactatcctacttctgaaggcctccctgtgctgtgagctctgagaaggccaagcttgcctgttctgtctctgctaaagccagagaccagccaatagcccagcacagggtacttcataaatacatgttgaaggaatgagctccaggaacagtactccacatggtagagatgtgtgtatgaggatgttcactgcagaaggtcatgtcaatgtgacaagtgacgagcagcctcaaatccagcaacaggggtgtgggtaaaagatcatagtgtagccatgcaatggaaccaatgaaaaaaccacaattagagcaaatccacatgtattaataaaggaggtgccctccatacatgctgcacctaacagaatgttgccaaataagaatgaaaaatgatgatatttgggctgtaaaaactagaagtcagctaaataagaatgcatcgaaagtatttgtgaatgcttacaattttataatgccttggcatccgttttggatggaagttggactttctcataccagaagcagggctcagtcacctttgaaatagtttccagttctccacctccttccagttcctcagtgtgattgatcagatatctgatttatacaactgcctcctggtgacctcctccctatgggacttccggatacagcccgtatgactgccccactgaccccacaccctgcctgctgcagtgaccacctctaattacctggatctcatgtctgcttgcattaaatccaccaattaaaactccctgaggacaatctgtttgaataatattctgtaccctaataaaggccttgacccatgggttccccctctgtcctccccatactgcccctgacctctgtgtgtgtgtgtgggtgtgggtgtatgtgtgtgtgtgtgtgtgtgtcctccagacagggcctgtatcccccaggacctgtaagtaataaatctttattttcatcttatgtctctcgcaatcattggcaagagctctgcatcttaaagatcgcaaatttaagaaattggtgtagtcggcacaatagagtacctcttctgtttagcacaagatatctcggagctgctgaggcttttaacatcctcgccggtgtggctgcctcactggtgaggccgttctgttcagtgcaattcagttgctccactgtgtgctgctgtgttgctgctgtagagtgctgccatgttgttctccccaaattgttaccgagtaggaacctgtaatgtgctcccaaggtggtctaccccatgagaagggggattctccatctagggcaagggctaggtgtgtttctggaatcctaatagggaaggcatccacagagggtgaactccactcctccttagagtgaggagtgacatttcccatttattttccccatggaggtgccatgtattgactttttctttcactgtcccaaggttgagccaaggtgagctatggagaccagggcaagataccatttctgttagcaaagcaaatgggtgacaacgtgtggagaagctgtggttctcctgatggatatagcagagtgccatttagtaaaatcttgtcaggaggctgcccctggttagaccggcagtgtctgtagtcactaaggtggatgcgaattttaggccctgggccatggataatccctgcagacacagccgtggcttcatgtgatggggcaatcccgggctagtggctcccttgtttctgcatttcttgctgtggttgcacaatcaacacctcaggggttgattgggtcaccttggaaagagaaacagctgcctaggaggctggtgcacatggaggccaccctcaattttattctgctaacaagttgtaagattaaaacaacagggggctttgggtaccatcaggaacttgtcaagtaaacatccaaagacagaaagaagaaaaagaaaaagacattaaccgtctagaaatacaagccattttaaagattttgcttaaaagatgcgcttgggctgggagcggtggctcacacctgtaatcccagcactttgggaggccaaggtgggtggatcgactgaggtcaggagttcaagaccagcctgaccaacatggtgaaacctcgcctctactaaaaatacaaaaaattagcagggcatggtggcaggtgcctgtaatcccagctacttgggtggagaatcgcttgaacccgggaggcagagacggcagtgagccaagatcgcaccactgtactccagtctgggcgacagagtgagacttcatctcaaaaaaaaaaaaaaaaaaaaaaaaaagacgggcttgtttcgtcgttgtggagtcatcccagagagaggctactccctagagtcactgaccacctttcctcctccatcttttcctcttatcattctagagacagaaaacaagaatctcagctttaggtggctaacctcaccccccaagaaaagaaactaccactttgattgactacaaatccaagaaaaataaaagagaaactttaaaaagtactgagcaaaccacaggtctagcaaacataatgctagccctaggttacttattcatttacaacaaacccctagatataggaggaaaaaataaaaggtaattaaatatatacacatacaatattttaatataaatatataataaatagttaaattatgtatgtataatatgtaactaaatcaaagtaaaatttcatactttgattctattggaaattcaaaattcatttattaacttatatattaaggaatttatgtaaaaaaagatttttaaaagggcaccaatttgcttttgtgtctctacaacataggatctaatttaactttacatttgctaaatacactaattgacaaatattcatggatttaatcaatactggggctcaaattgtagccacacgtgggaatcccataaatttaaacactctgtccctattatcttgagaagaaaactaaatataaaattgaaaaaaacaggtatgtctcaatttacctgtaactttgcctaaatttcccggagtcatatacccattgctgtaaaacattctctattggacataggtgctctgagacaataaataaaatagaagtgtttttggtacttagacattggcttgacaaaatgggatcccatgaaacctcagttaagatagtgaatacggcccaatgtgagttgaaatggggcctttaaggattaaaacttattacatgaaacctagtaagtaatggggtgattatccatactgcttctccatttcatagcccaattttgacagttgtcaaatctggaaaaaacaaacaaacaaacaaaaaaacccctgggaatctgttgcctcacagagacacaaagtagacatcaaaattgtatatctcagttccagttccaaaatggtggcatagaagcaagctggctttactccttcacacagaaaaccaaaaacaaatatacagcaccaaaattattaccagatatattccagaactcaaatatgaaaatgaaacagttttcagagccacagagaagtgaaaaaaactcccgacagatgacaaaagaatcagatttccccatctgtaatgtccctccctgccccattctgcctggtaccaggtgtgtggaaaattttaccccaactcatggtttctacactgggaaatgtaagatcaatgcgggcaaccagtttctgcacaatcctgggttccctgtccctgccttaacccacaagaagcattgtgagtgcccgaagggagaaatttccctgaggacagtcaaagagtggggaggcaggactaccatctccttccctggaaactctgctgtgtaactcagccaagggagacatgaaatcagactggtgtttcagcagctccatgttgtagtaggtttgtttcacaggtatcctgggcatggacatctagccagctttcccacactgccaggatatcccctttgggacctccctcagttaggaagggcacactctgatcatttactagggccaaggtaaaccctaaaggtaacttagagatgaaaaggaggtagtgacctagcagtaaagaactctaagaaaatctatccaataaaaatcaaaacaagccagacaaagactaaaataaataatgaatccttcaatgtaaagacctggacttacatccacaagaaacagtaagcaggtaaccatgatctccccacatggacaaagtgaggaacaagtgactgatcctgatgagatggtgatgtgtgagctctctaatcaagaattcaaaactgcagttttaaggaaactcaatgatcttcaagaaaacatggaaaagcagttcagaaatttatcagagaaatttaacgaagggattgaaataatttaaagaaaacaaacaggaatcttggaattgagaaatatatttgctgaacaggaaaatttattagagtctctcaacagcagaatggatcagaggaaagaatcaacccaaataagactcccccaaggcataaaataatcgaattctcaaaagtcaagggcaaagagaagattttaaaacagaaagagaaaagaagcaaatggcataaagaagctccaattctgtggcaacagattttcagtggaaatcatacagaccaggagggagtgacatgacattctcaaaatgctgaaaaaatattgacatttgagaatactttatccagtgaagttatccttcaatataaaggagagagaaagtttcctagacaaacaaaagctgagataattcacaccatcagactagtcttcctgtaaatactaaagggtaaatactaaatacttcaatgtgaaagtaaaaaaaaaaacactaacatgcaaaacaaccacaacaacaataacaacatttgaaggtataaaatccactggtgaaattaagtacgtagacaaacccagaatactcaaatagtaattgtggaaagtaatccaatcataactctagcatgagtctcaaaatataaatctatcaaaaacaataatacattttaggaggccaaggttggcagattccttgaggtcaagagttcaagaccagcctggtcaaaatggtgaaaccccatctctaccaaaaaatacaaaaatttgcagggtatggtagcacatgcctgtcgtttcagctatttgggaggctgaggcaggagaattgcttgaacccaggaggtggaggttgcagtgagctgagattgcactactgcactccagcctgggtgacagagggagactctgtcttaaaaaaaaatagctacctgtttggagaaaggtaatataaaatatgtaaatagagacaaagtcaaaatttgcaaaggatgaaattaaagagtagagtttttttggggggttttctgtttctattattttatttgtgatctaagataagttgttaccttttcttctcttgaagatactttgttatatctatgtttttggaagtcttatggtaactgcaacgcaaaaaatctatgatagatccactgaaaataaaaaacaatgacttaaaacatactaccagagacaatcaaccacaaggaagacagtaaaaaatgaagaaaggaagaggggagttacaaaacaaccagaaaacaggcaacaaagtggcagtagtaagttcttacttaaaaatattgaacactgaatataaatggactctattctccaattaaaaggcatagagtggctgaatgctgcctatatgctgcctacaagaaaccacttcatgtaaaaagatacaaatagactgaaagtgaagggggtggaaaaagatatttcatgcaagtggaaaccaaaagagagcaggagtagctatactgatatgagataaactacaaatcaaagactataaaaagagacaaagaaagtcactatgtaatgataaagcgctcagttcagcaagaggagatgccaattataaatatctatgcatccaacacttgagctcccaagtctcccaagtatttaaagcaaacaatagtggatctaaaaggagagatagactgaatacaatattaattaggggactttaacaccctgctctcagcaatggccagatctttcagacagaaaatcaacaaggaaacttcaaagttaaactacacactagatcaaataggcctaactggcatttacgggacatttcactaactatctaactgttacagaattcacattattttcatcagcacatagaacattcttcagaacagaccacatcttaagtcccaaaaccagtcagaataaattcaaaaaagtttatatcacatcaagcatttgttctgaccacaatggaataaaactacaataaatgaataactttctggacacatacaacctaccaagatggaagcatgaaaaggcagaaaaacccaacaaaccaacatgaaactgtaacaaaaggaaaacccaggaccgaatgacttcactgctgaattctaccaaacatttaataagaactaaaaccaattctactcaaaatgctttaaaaaattgaagaggatggaacactttcaaactcattctacaaggtcagcattatcctgataccaaaaccagacaaggacaggacaaaaacaaacaaacaaacaaacaaacaaacaaacaaaaaaacactacaggattgcttgaggccaggagtttgagatcagcctgggcaacatagtcagaaccaatctcttaaaaaaaaaaaaaaagaaaaaaattagccaggcatggtggcatgtgcctttagtcctagctactcgggaggctgaggtgagaggaccaattgagcccaggaggttgaggccgcagtgagccatgtttgtgtcactgtactccagcctggggaacagagcaagatgctctctcaaaaacaaaaagcaagctgggtgtggtggctcctgcctgtaatcacagcactttggaaggctgaggtgggagaactgcttaagcccaggagttcaagaccagtctggacaacatagggggactccatctctcaaaaacaaccaaccaaaacaaagccaaaaaagaacataggccaacatcactaacaaacatagatgtaaaagtcctcaataaaatattaacaaaccatgtttagaaacacatcaaaagagatcattcactatgattaagtgagattcatcccagggatgccagtatggctcaacatatgcaaatcaataaatgtgatccatcacattaaagagaaccaagaacaaaaaccatataatcactccagcaagtgcagaaaaggcatttaataaaagaatgggttgagggagtggagcccatagtcagagcagcagtggtctgggattttggaagtagaaagaagggcagcaccactggccaggaccaccagggaacacccccataggccctgggtgttgtgctccagggagggttccctctggagttattaatcttggtgtccactttgcccagctgcccctcacagggtcagggaggatgaagggaaagcttccttctaatgaaagttcagggactcacagttcctagagcctgtagggagaggaagatcttcgaggaagagcacctgggcattggggcgtttgagaggaagatctatgccaggtccaagtggacaacctgtggactctctctccagggacatacgggtatctgggaatctcctgtagcttaaagaggtaaagacctctccctttagcctgaggactggaggatgctggttcaggtgaatgagtcctgcaggggctggtacaggcctggagggtggtggtgtccagggccttgggttcacccttagcatgattcaggccgggcggtgtttcacatgagcaagagggcctgggttcattgcttcaggacaatggtgaaatctcatggtggaagaaatcttgtccttgccagtgcccagctttcatttggtcttggcccagagtgtcctccctagagaagactcttgtcccttcttcacactgcccttcagggatatgccagccttatgggataagatggggtggagactgtagatgtgggtgggaatctctccacagagtgctccttctctcagcggttgcaccttgtctcagggcttcagcttgaaatctgggatctccaagcccttccctccccagtcctggccaggaccacatgggcagatgcattgtgtgaagtgcatttcatttggggtgtcctctctgcatggcaccctcccgttgattctctttgcgcatgtcagagtgcaggcaccatccacacctcctgctggaggagggacggagctgttgactcctgagagctgatcatgtgttcccaccctcacacacaatcatggtccatcctctgagggacatgtgttgccaccactgtggagatggtgcaactgacagtaacaaacagtaaaatctggtactgaatgggaccttaagccaacaatgacaatgtcattccaaggtgtttcatttttattgattcaatgcaagtcacctgatttcattgactattcacaatagctcgataaagtaaatgcatcatcaccaccactttaaagaggaaaaaggtgcttgggcagtttgtgactactgtggtggctgctgcattgctctctggtaaagccaagtaggtggtgggtgcggcctctgggctgggatgatccaccctcctggtggtggcaggggagccaagctggagccatggcctgtgcagtggtagcagctgaactgaccgctgctgcaggatttgcaagctgttacattttgcgaagccatgaagcacataaaacctcaagtagaacaagtgtttcaaagtctaccaaaatctgccttcagagattattactacagaggtggatatgaacccaaaatgacaaaacgggaagcagcattaatactagataatgaatgaacactagtaatagtagggtaagccctactgccaataaagaaaaaaataagagatgctcattaacatgttatgctcttaaatcacgcagacaaaagagggtctccttatatagtagccacaatcaatgaagctaaagatttactgcaagatcaagctaaaaacagtaggtgtataatgaatttttaacttcatattagtttatgtatatgaatatcaagtttttataataaaatgcctccaaacaaagaatatttgatttagggtttaataacttctaagaggggactcagatgtttcctgtttcacagtcagtctgagagggtcatttttcctggagctgacctgggtggaggcctcacactgatactccccagcatcctctctcctgatggggtttatgctgagcatacagtggccctgggacagctccattctctccatgagtcacagacgctggtcatggaagatccactggataaggttccagagtcatctgtggggcaggtcaggatcacaacatccttttcttctgtgactctggtgttgctgactcagatggggtcggagccactgaccctgtggacaatcagtggaggtgctcaactgaaagtgggctgagggcacgtcttctcctccatccctgggtccttaaggtaactgtggaccccagaccaactgacacaggagctagaaagaaattatttaggaagttagtgagggtaagagcgtccttggcaaggtttcccctttaacaaaaagcagcccaagataattccttttctaacaaagagcagcctgaaaaattgagctacagatgtagatgagcaagatggaagcttgcacaggtgaattccagtaggtgtgccaatagaaaagggctgcctggaagccaggtatgttcaacatggagactccatcctcccttttctccattaccacatgtacagtaaaaaaccaggcaacatggcaccggccaggtagacaatccatctgcatgacaaaagatcagagtggggcagccagcaaatggcacagctggtctaaacaatctttcaccccctgtataaatcagacactgcctcctgaagctcatctataaaaccttctgcatttcactatggaagtggcaacccattttccccaggacccctctctctgtgcagagagctcttctctttctttcccctatgaaacttccactcttaacttcactctgggtgcctgcatcctagttttccatggccatgggacaatgaacctcgagtattaccccagatgaatgatgctgtttcacaatcactggttcagctcccttcttcttagggtttcacagctcggtggggagaataccacgcctcagtggtctggggagtgaggaacaaatgaagaattaatcagattttacttagaacgctatcacctgcctcaaccatcagatccatgttgggaatgtccaggcctcctctcttagatctatacccacttcactggacctgaaatcctgtgtttcccgatgtgttggtgtcactcctatgagaggataaaggagagaactttgctttctctccccactcacaccctgcacaagacagggcccaatatgagacacacactcgctcagtagttctctcatgaaggagggagggagtgacctcgagtgattctgccatctgtagtctgtgtaccctggccagtggctgtatcttcatatgcctcagtttcccctcagtaaaataggacacacaatgagaactaaaaataaaattctaattccccagtgaactgaaaggatggcctcttggccaagcggatcccagagttcctgatcatgacaggatgggaggttacacctcattacagcccctccctttggaagtttagaggtgacaactgactagcattaacgctaaaatcgagatcatgagactgacagaacagactctctgtggccataagataccaaattataaactcaacctaaggtcatgcaggcaagggctaagccacactttcctacatttaaagaataagctatgttctaacacagaattttctttctctctagcggctaaagtaacactagccttcgagataagcaatattgaaatgatcgcggctcatccaccaacactggctaactgacccctgttccaacagccacaactacacttcaattggacaggagactgatttcagtaactttctcctaataagagaccactgagcatggcctggttctgctggtatacagacacggtgcactgagtaccataatgcttgtttcatcttttgatgtataagacctaatttaatacatttaaatctgaattctccaccccaaagtgaacatggggtgcatgtagcatgcatgtttgttgatcacgcatgtgcgtgtacttcctttgtgagtatccatagctccacctataacctgttgaatatgtatacctggccaactcattcagcataaatctatcttccacattcccctcccttgaagtgcctgctattggtctctgctggaggctgcatcttctaccctggggaatggccagcctgcaggctgtaaccctgtgtaagaaataacctggttgggtgcagtggctcacacctgtaatcccagtggtttgggaggttgaagtggtagaatagtttgagctcaggagccagagactagcctgggcagcatagcaagatcctgtctcttaaaaaaattttagggaggagagtgaggatcagaaaaaatacctattggctattatgcttagtacttggatcatgaaataatctgtataccaaacccctgattacatatataacaaacctgcatgcgtatctttgaacctaagataaaagtttgttttaaaaactatctgggtgcagtggtgcatgcctatagttccagctactcgagactgaggtgtgaggagtgcttgagctcgggggattgaggctgcagtgaattatggtcccacctgtgagtagccacttcactcaaacctgggagacagagcaagaaccggtctctaaaaaaaaataaaaatagaaaaataaaatgaaaaatatatgaaataaagtctcctttccaaacgtacagatctccgatttttctgccaacaatgataaatggtcagtggcttgccatgttgtctgtgaattacttttaaaatattcacgatcacctgacctaaaggttggtaccaaggaaccgcctgaatacaccgtctctgattatttgcctccaacagagtgttccctgggcctgatctctggtggacaatgagctgctgggaacatcctctcttctctattcctcccctggggatgctgaccttcccttggagtctcctaagttccccagggcagtcggctaatgtcctagggagcttacctgtcttctccataccaagtctcatgtgaaggacgaggctttgcccttgcccagatgaggctctgggggctgagccctggctggctaccagctgcaagagccatggcccttggacagctggtaaatccttgttcccagtcagccctgcccaagatgcctcaacccagccccggcacaggcttcccagggtcacatggagtcaggatcctgggacaggggactggacaggggtttccagggctgagtttctgaacaggggcttcccaggggtcccctcactccaggatctgacatggtcctacaaggaacgtccatggggaggggacccaggagggggaactgacactgacctccccttactgagcctccccccaaccccatcagactgtccttcctctgtagcaagtgcctgcagggtctggatgcaggaaagaaattctgatctgtggaagtttgtctcccctgtgtgtgtcttgcactaaatgtccaaacccccaaatgggatgtaatgtagagggggacacaggcacagcccaggcctgaaaatcctgtgtgtgtgaagcagaactgacccccaacacccagagctcatgagacatcactgtgtacgtgaaactggccagttacttcttcattcacaagatctgtttttatgacttgtagggtgtaggatcctgtgtcattgttggtgacattctgtatcagcagacatgtattggggtatattgtctctcagcctctgtggcaggtcctggggtaattacttgagttcctagtacatatcctgtaattcccctttgtaccagttgtagccaagcctaaggcagattgtgggtgagtggaagaatctccttgccttctgcagcttcaacagtgacttgggcagtggtaggcaagttccagaaagttaaaagtgaggctaggagtggggagagagcatcagttaatactgggccctatgcattgaggtggaaagatggggccctaggtcctggacaggtctcttcatccctcagccttggagtgtgtgtgtgtgtgtgtgtgtgtgtgtgtgtgtgtgtgtgcgcgcgcgcgcgtgcgtgcgtgtcctactgggccaaggtcagcagcatgacctcccttccttcagtgcctctgaccttggcatttccctgtttggagtccttttccccaggggtctgcctggctccctccctactgccttcaggtcctgctcacattagggcatccttgggagaccccttccctgacacctctagagaccctgggtcttccctttctgacctttcgctgctgtgttccctccagggctcttgtcaatacttgacctcacattctagatacccttgcatgtctgtcttcctccctatgagagcatgagctctgtgagaacagggacttgtgtgatcttggttgcaccccagtgcctgggacaggctgcggactcctgtggatgagctcatgagtgttcccagggcccttcacaacgtgggatttattttccaatggctgaggttgttggctaagagctctgttggagttcaatcaggctggtgggaaaaatattagagatagttatagagatagacacaaatcttcttggaagaccaaaaagtttgcataactttggtaatagatctgactgaaggtggtccctttacctttagttaaacaaattaaagtagtaacaaaggaaggcagagtagtttgtctagccagcttgtttactcatgtgatcttaagactaaccattgatgtgccacaggtgcttaattgctttctacttgggaagtccacaatgtcaattaccctctaacggtgttgactcaagcctttgttaattaatcttactgaataaatatgagtctcactagctgatcaaggccatggtcacaactgtttataggactcagcagggagtctgtaagcggccctgacagactcagctggactggcaaagcaaaatatgtgtgtgtcagtgtacactattcacccgtcccccacagctggtgcccctatatgaggagtgctgccacagagctctgtttagtgtcccttgttttttttcttgagtattaccccaacttaaattgtgattattgtcatctgttttcaacattaactgctcagtgatgattcacttggaaaacattaacaatcgagattgtttcttcactaacaacctcagattatttagattttcctgttgtaatcccttcttcctgtttagtgtccaacagaagccctctgtccctctcaggtccccgttctctccaagaaaccccagccagtctctgtgctccctcctcccatccactcccagggagccctcccctcacctgtgagcagaagcgcctgccagggatgtgcactctgtgaggaggggctgagggaggccccatgggctctgctgtctgctttgtcctcctctgtggagaggagcttgggcttcagaaaataaggaggccagaaagtaaggaacaggctgagaaataatggggatgtgtcgaaaggtcacagatgccaacatctttgtcctatgcaatattatccataaaattacaggtttgagatatgcttaaattttcttctaacatgcattaaaataaacatataacttttaatagttatattaaattgtatttaatataaattaaatgctcttgtcagagctactgtgactgtcagctctgctgtccttcctctctctgtgctaagcctcctcccagggcagaagcacttcccagggccaggggtgggggcggggaaaggtaagtggcaatgaggatctgcacaggtagcctttccgcctcctcccctctcagtcctgcctccttgtcttcttttcctctttttctccaatctacatttcagttccttagaccacgctgtgagaagcaaggcttattgggacccccatcccttaacaggatgacctgtgctccccataagtgacctctgctgtgtctagggattggctctgtcagcacctcacagagagtccctggggcccccaaactcagtgttattttctctatgacacagaaacccctctgggtatgcaaggttttcctcatgttttctaatgtctgggaaggttggatttactcccagcagggaggtcacagagatgtccagggagtggggtcctagaaatggacaaatctagagctaaagcccaggtctacgattttcagttgtttttttctgcagtgctatgtgaccctaatttcctaggagtaactaaaatgcaaacctcagacatttgtagacattttatgatttttctctacagcttgtaccactgttattattatttgctttatgctttttcctaaataaatttactttacaaaacatccttgtcctagtagggtgcaggggctcacgtctgtgatctcagctgcttgagaggttgaggtgggtggattgcttgaggacgggaatttgagacaaaacatctttgtcctatgcaatattatccataaaattacaggtttgagatatgcttaaattttcttctaacatgtattaaaataaacatataacttttaatcatcatattaaattgtatttaatataaatttatatacaatacatttttatataataaattatatatataaatgtatatataatagtttttcttttttgagatggagtctggctctgtctcccaggctggagtgcagtggcacgatctcagctcactgcagcctccgccttctgggttcaaacgattctcctacctcagcctcccgagtagctgggattacaggcgcctgccgccacgcccagctaatttttgtacttttttagtagagatggggtttcgccatgttggccaggctggtctcaaacacctgacttcaggtgatatgccgcctcggcctcccaaagtgctgggattacaggcatgagccaccatgcctggcctatatattttatataattatataaagttttctataataaattttatataataatatataaaatggatatttatttaagataaagttattagttttatatatttacatatatttaggaataaatgtgttactgtgggagcccagtgcccaggcaggtagtcagtacatgatggttgtcattagggttaatactttggaattctggattttttcccaagagagtgtctacgctggaatattgggcttgtggctttctgctgatgtgcatgtgtgaagaagctacttccacttattaggacttgtgtatctgtctcgcagtttcactacctattttctcgtgatgttggtcaagtcgcctaacttttctgtgcctcatttacctaatttgtagaatatgggtaacagtacacaagtgtgagtgtgtatttcccaggactgaccactagagggcgtgaaggcaccggcacttactattacagcaatgggtgtagtagtgctcatggtcgtaaacatcattctcccatgaaaggaaccagggcttcctgggagaaataactgattccagggctggggccggaaagcacaagcggagcctggagcatctcgtgaggccagaaagtaaggagccggctgaaaaataatggagatctgtcgaaaggtcacagatgccaaccagaaggagctttgaatgaccaattttgagacaaaatgagcactataagaaataatgatagtaataaattccaacccataaatacccatgagttcctactaatataaataaataattgaatacataaatatataaggatgaagaaacagctttttcttacagcagaattccaattaatgaatgtagaaggaatgatcaaatagaaaatcactatttggctaacagcacagtcaattgtttgtaggcaagaattatcaatggactttaaatatgaatgggtaaaagtatgatgatgctacaactagtgagtaccaagggggaaaaaaaagtacgttgagaagaaacaggctacttccatattcccaaagtatcacttcaggagctacttattgattataatgggacaaatagtaacttacagtagagaaacctggcaacagagtctctccgaggtacaaaggctctcttcaggaaggaggtaaggggaaggaagaagaaaacactgtcctgcctcaattatttgctttccccattctcaagtgtacttcatagacattcaaagatatgtgttgatagtgtccacgatccacatggctctattatagtcatttattcacacatacattcagtgaggctttgagtgcctaatgtgtgcctgatatttgctagatggtggatgctgagaagatcaggtgtgctgctgtctctagggtgactgaatccacctgccccactttacagatgtggaaattaaagtgaaaaggatttataggattagttcactgtcacaaggtcactagccttaaagttacaggagtaaagcaagtttcctgacttgctagattttctgctgcaggtgctgacaatggtgagctccaataggagagaggacactcagagtgaagtgggagccctgaacaccctggattagccaagaggacatgccgggtccagctgtgaccgcacaaaggaccattggggatatttgtattctctttttcacttagagcttgaaatgaggaaaactaagtgcagaaaaccaagagtggaagatttttcacaaagcactggtaacatgcatcagaaaaccctgtgctgatgtctgtcacggtgtttctcactgaacggtaatagtctggctttgagtgtgttccctctacagcctggagttctgcgaggcagggaccaggtgtgattcatctttgtctctccagtgacagtacacagcaggctctgataaatatttcttacaaaataaaatggaataaaaagtagacatctgcacaggtgtgggatgactgagcagcagcagaagcaggaaaagtcagcgtccccagatcagctgatgtggtgttcggattctagataggggtgaggtgccaggatggggatgggggtcctgtggctctgctgccctgggggacacccctaggtttcacagtgcctgctgtggttgctgcactttgcttccccatgggaaagtgatcagagggtgtggggcttcaggtgaccccatgtgggaaatggccaagggaaggtggggtgggcggcacatggttttttttaaccaatatttgaaggtaggttgtatgaaaaggtgttaggcttatttcagcttatggggagtaggacagggattggtgagtgtgtatcaggtatattttggctcaggatggaaaagaactgtcacagtaacataaggtcttttgggaaattacatgtttactggcagagttcaggccagggctgggtgtctgaaaatacctgtcagggtcacttttatggttacaagggcagagcttggcttggaaccaggtttcttactaataccacatattaagtattataaaaactgtcctttgcaataggacattgctctatgatgcaggttgaggtccctctgtttaagtaattgtgggtggctgtgattctctcatctagtctgcgacttggacttcacctccatctgcagtccctctcctttgctgttgacactggtcagagttaagcgcatttactgacgatggtcacagggtggcagcactgcctctctggtattttctaaaacctcttcctggaactgagccagtctaagaggatgtcatgactaagaaaagggcactaatgaggtgaacagataattttttttttcttgtttctcctgtgaagtaacagagtggaggtgagcatggaataattgccttttagaaatggaagacaatggagagaagtgtttcgcaaaccttaatgtgttcacagatcccacacagatctttttattcaatacagattctgatttttctggtgaggcctgagattgtgcatgtctaaggagcttttggatgatgccattgctgctggttggcggaccacactttgagtagcaaggctcgaagatcatttagaggttaattctcactgcatctaatttatggatgaaaacaaaccaaggtccagagagagcatatacagcttgcctaacaaagccattccctaagtgcctgacttcttgcatttaaacccagggcttcagcctttgtccagttctcactccacacatcacacggtttgttcactgttgtgaacgacagttgtggcagcatctctttagtttaggaatccagagccccaatttcactaccctctttggtcttggctcatgctgtgacttcgaatagttttgcccttacttaaaatcttcagtggctcttttgtaatcacaagatcaagttcgaatatctctgtctagtgttcatggctttataacatatggtatctctttagtaaccttacctaacttccctgttttaaaattgtctcttgctgccatagccctccttgctccttcctgctccctaacaaactgtgttcacttctctctcagtggtagtgatgatggcatggcctctgatgttagactcatgtaacttctaatcccagatccaccaccaacattggcaagttgattcatctttctgaggataagcatcctcctctgaaataaacttagatggcggttgagaggggtaaataaaataacacacaaacccactctcatccctgagaccctcttcaaaactagcatataaaaatagctatttgaagaggttcagtgaaattcaaggtaacacagagaaggaattcagaatcctatcagataaatttaatagactgaaataatttttaaaaatcaggcagaaattctgtagctgaaaaattcaattgacaaaccgaagaatgcactaaatctttcaacagcagaattgatcaagcagaagaaagaatttgtgagcttgaagagataatatatgaaaactcagagtcagagagacaaaagaaaaaagaattaaaagaataatgcatgcctacaaggtttgattattaagctactcaaagagatacaagagaagggtgaaaaccaacataaagaaatgtaaaaaacaatcagaatataaatgaaaaattttctaaaatgctagctagtttttttttgagacaggctcttactctcatcacccatgctggagtgaagtggcacagtcatggctcactgcaggctcaacttcctgggctcagatgattctcccacattagccttccaagtagctaggactaaaggcgtgtgccaccaggccaggctaattttttgtatttttagtagagatggggttttgccatcttacccagggctggtcttgaactcctgggctcaagtgatccaggagattcactgccaaaaaggatataaccaagtcatatagtcataggttatctaaagtcaatgtgaaggcaagaattctaagagcagtgagacaaaagcatcaattaacttataaaggaaaacctatcagtctaacaccagatttctcatcagaaaccttacaaaccagaaggtattggggtcctaatcttttggcttcttaaacagaatagctctcagccaagaatcttgtgtagagtgaaattatatttcaaaatgaaagagagaaatacagtctttttcaggcaagcaaatgcttcaggatttgtcacggctagaccatcctacatggaatgttaaagggacttctaaatcacaaaacaaaagatttaaatagaacagaatagaacctcttgaaaccaaaaaattcaaatggcctataaaacaataacacaataagaaaacaaagtagataacgatcaacatgatgactggaacaaatattaacattgaatgtaaatgacctaacactccacttaaaagacacagattggcaagataaataaaaaatcacaaaccaaatatcagctgtcttcaagagactcacttaacatgtaaggattcttatagactcaaggtaaagagatgataaaagatattccatgcaaatggaaaccataagtgagaaggaatagctatccttatatcatataaaacagactttaagcaacaacagtaagaaaaagacaaataaggcaactatataatgataaaaggatcaatcaaacaagaagatattacaatcctaaatatatatgcacctaactttggagctcccacattcataaaacggttatgatgagacctaagaaaaaagatcaacacaaaacagtgagggtgtcctgggttttctttttattggacagcagtgtactagcctatcactttcccagtcaggggatttttggtctccccattcccctaccatgggttcatgccaaagtccatattttttattagtgtttggaattggattttttttttttgaggtggagtctcgctctgttgcctaggctggagtgtagtggcacgatctcggctcactaacctctgcctcctgggttcaagcaattcttctgcctcagcctcctgagtacctgggactacaggtgcatgccaccacacccagctaatttttgtatttttagtagaaacgagatttcaccatattgtccaggcttgtatagaactcctgacctcatgtgacagggaaacaggcactcagtgaacttcatgcgattgaggagttaatgataatgagagaagggctgtgaggggacagcactggggacaccagagcctgtgacgggctgagttgctgtgccttgggagatgcccttttgactgagccctgggaaggagggggtgtgggggcaggagctgcctgcagagggagtggcctcaggtgggcggccacctggctgcagggaagaggtgacagagttcgtgtgcagagcttggagggtgaggaggaggtgggttgaggtgaccttggtgagggtgaaccatggggggctgtgggccctgctgagggaggccagccagccctggacctacagggtggtttggtcttttttgtcccattcccagcatccactgagtggtgaaactctgcaggccagggaccatcccactggccagaaggagcgcacagtaggtgcccactcagtgcatgttgggctggacagaacctcactctgccccctgcccccagctttgggagctgcagcaaggtccctccccctagggatctccatgcctctgtctctgaggggtgagatggggagacttcaaagggccatctcagagtgtgggggatagagacgcagaagtgtgggggatagagggaggcctgggctctagacccaaaggaccttacacacctcctgagtcttttcaaatggtttcttctgttactttaaaaatgatgtaagtcatcatatttattgtaaatcccaggaatctaatcatgcgtaaaataaggtgtcttatccttgaccccaccccttccccaattaaatttccaggatgttaccactgtttgcagttggtgtgaatctctctttaataatactctgtttatctcacttgtcgttttacgccaaaatacccattgaattatattattgctgaagaccattcttttttttttttttttttttgagatggattcttgctctgttgcccaggctggagtgcaatggtgtgatctcggctcactgcaacctctgcctcctgggttcaagtgattctcctgcctcagcctcctgagtttctgggattacaggtgcacaccaccacacctggctaatttttgtatttttagtaaagacagggtttcaccatgttggtcaggctggtctcgaactcctgacctcatgatccaccctccttggcctcccaaaatgctgggattacaggcatgagccaccacacctgcccagaccattctgttctactgaatcatgtgtggtgggcacctcttatatcaatacatatggattttatcttgtgtttgttattggctcccctttttctcattgcatggctacactcaatgctttgtccacacccctgttcctgggttggaatcttgtgacagaaaatgaagtaacaaaggctaaagctttctaaagtggagtcaggagattgcaagacaattgcactttcaccagcaagagctcaaaccacagaatgttccaatagatttggataaacagctgaagtcagtattcaccagccttcaacatctcaactaggagaaccctaaaattaactaagcacatagaatggaatggacttgtgatttaggattccttctcagccaatgagctgcttctgaaaacaactttttgtggaaattacctgtaaagaaaaccctctcctgtgcttgtcttacagaacactagtcagggctgccctgattcagtggacccgaattgctattatttgtttcctaaacatatggtattttctgtgaccttcatctcaatcttttttttaagttactgggctgtttcccagttttcataatgacgagacattctgcagtgtttcatacacatgtcttttccccatgtggagtattgatccaggagctcattcagtcaacgcatgtttatgaagcatcctgtgccaggctgtgggctggtcactgtcttcagcagagagaggacaggcacagtcttgccttcacagagctcacagctcagggaggctcttagaagtgggatactggtcggagcatgtgcacattaaacatgatgaggtcaaggttgctatagggactaaaccacagtcccaccaagatcgcattgagttcctgtggtagaccagaggtcagggcccctaagatgtcctgagcagctccctctgctcagaagttttggttccacaggtgacacacctgagcacaggtgacccctgcagaacctgtgattaccacccaaagccaagagtgagtggtgggtgttctaggaggaaccgtcacctccatgggcagggttggggaagactgaggggagcaggtggctgatgactttggccagaaggtagggggatgggcaggtgtgcgctcatagggaagggaagagaagggagggcattgcaggcaacaacacaaaggttggaacctgccttcatggactgagaaaagcagggagtccacccaggctgcagctggggagggaagacatggggagcagtgggtctaggggagaagcagactgcgattgaccttggggactgggcagtgagcagaggtgtgttatgtgtgtctgtccccatcatagatatgaggaggggtgaggccgcgggtggcacctgggtcggtgggatttcatagtgcctgctgttccctagagcctctctgtatagagggtcagaatagatctgaggctgtggtctgggggaaggggctggtggtgcttaccatctctaggggtgggaggagagggatgaggatgcccctgagcagtgaagcctcaaggtgtgtggagccacagttgtctctcattagacatgtgttttgcgtgaggatgccagggcctggtggttattactgttgtcaagtttgcatgacaaggacccaggtatccagggatccagagcacagggcccctggtgaggggatgaggctcagatggggctgaccaggttcatgtggtcagagtgggagggactgatggagagacagagcctcaacccctcctgtcaggagctgtggctatgtccaggagagatgacaaggatgacccaggacattgagtgagtcattgagacattgaaggtgaggacagggcagagaggaccctggtgactgctgaaatgtaggatgtgaggagggctctgacccatgcaagttacaggacctccccacccccgagcccacagatgacccttaaattgggcatcctgagtgctgtgtgtgcccagcagggacactggataggctggacctgagtctctgtaagggcagcgctggtctgtaggaccagagtcttctctgtgggtgtgacgtgggcaggaattagcaagatgggggtgacaaggcttggcttggaggatctggtacagaagcccatgggcttggtcagctcagcttctcaggggctcagctggggctggaggagcaggatgctgtgctcagggcatgctccaggcagcgtgatgtgtgtggttccagggtcaggcacgggggtcaaaaattaaccatgaaaagttcccaccttctgtaggcagagaaaatggcctgattgtcagggtcagggagacttaccatgtggccaaagcaggctctcagcctcccagagaccacaccctgggtgcagcactcagctctgcagggtatggcaatagatgtgccaagaaccccaacatccagatgcatgcaaaaattttgcgatatataaaatagagcagatcaagtttccctgcaataacgttgttcctggttgtgtctttttcttgtaaactagacatggacatctttccagcagtctgttctcatctgccaccttcctgctgcagcacctcagaatgaacattcctgagacactgtccgtggtgctgacgaccaagagctatggaacagagtgtgatgtagaatcttctagttacctctgctctcctttcacttttaacaacagagcatcattaacaatgagaaggtggagaggtgttcaggatcttgaagtgacttctgtcttgctctcccataaccctgaagctgctgtagacattattgcagaaactgacaccacagtcaggatggccttgtccaggagcccatgtgcagtttgtagtgagcaaggatgagaaaatggtcttgaaaggggtgatggacagaacaggggcttttcaaaaatgtcacatcatcacccccagcatccgtgaatctgtcacatggtaagagaccttacagattaaatgaaggattatgagtttggaagattattgtagtttatccagatgggtccaacataatcacagaatcccttccttacaaatgagagagggaggtgggagagtcagagaaggaggaggagatgtggggatagatgcagaagacagagcggtgtcaagatgctgcactgctggctttgaagatggagaaagaggacacagccaaggatgcaggaggcctctaggaggtggaaaaggagaggaaacgcactctgccctggagcctccagaaagaacgcagccatgtgggcaccttggttcaagtttctgtgtcacttagcttgtgggaatttgtcacagcctcaacaggaacctacagaggagtcaccttgtgtgcaggtgggatccagggtcatttacagctaaatcctgatgtaaatattgcaggttgcttttcctacttcctatctcatggccaacaaccctggacaatggcagaacacccttggaaaccacggctctgtgctttagtggagggaccagcttgtttgtgggaaggtagcacctggtccaagtgaacctacatgagatcgttactctccccagggccctcagggaagggctgagaacagctggcccaggtgtgtggaggagctgcaggtgaggcagggctggaggggcctgtgggtccaggtagaggggcagacaggttgtcccatcgccatgggagcctgcacgagctttaggttggggaaccctgctcctctgacctggacgctcctgtgtggagaggaggcttgctcagtgagatccacgccagggggtaaattgggaactgatgggaaatgaggggctagagtcctgggtagtgcctgggaggaccttgctcaaggactgaattcttggtctgttcccaccttggttactctgacaacccctctctgtgtcccacggggataaagatctcctgagcagtggccattgggacagaggagaacctggtggccagagctaagcatccaggatcctggatttggggacaggcaagctcattgctgggggacagtgatagatacggcctccagggcctgggtgaagagagcaggagggctcaggacactggaggctgtgtggaggtcacacccacgatctgtaccacccatggatgctcctgcattgctcacctttgtgtggacatcagatggccccaacttttgcactcctgagacatctcatgcattcacagagggacccaggctggggctgtgcatggccttggtctctagggtagtgtgaggacagctgagcactcagctggctgggcaggactcctgcgaatcctgccctttcctgtgtagggtccaccccagcctgactcctaaccccctactcctgtctttccagggaagagagactggggttgagataaggtggagatatttttcctgtgtgacccaggagagaatggacatggagtttcaggtgagtttctgctaagttcccatgagcagaaaaagagccaatgagaggaagtttcccctttattcagatcctttccaggtgaccccgggtgggccataggcccattcactttccctgcaagcccccgcttcctgtggtgatgggaagccttcgccttggcccacccagagcccggggcagtctgttgaggtctctatatattcagcagggacccccatcccttcctgtccccaggcctgtgtctcctcaggactcagagctggttctctggctcaggctccatgtccttccccatccccagggctgggggcttcagggacgctccatcaacccacaggagcagctcccagaggaacctaagaagccacatctgctttgtggtcgatccagcagtaaatgtttgtgtcagagtgtagcaattccagtaaaaacagagaagaggtcttgacccctgaggccttctcagaacagggtctggcatctctctctgggcccacccagggctactctgggactgaacctggctgtgctcagggggttcctgctcccaggcccctccctcctctgctcaccacctcctgttattttcactgcagtttcctgaacttcagctcagccagatgccagtggggacagatcctgggtctccctggggcccaagggaccagaatatctgtggcccccactcacctcatagatgagagcagctgccctggtgctgggtaggggaatctgggcaggggagagaggggtgtcaggggacagggaaggattcctgctgtgtaggaattccagggctctcctcaggtgatggagggtcccagggtggggttagcacagggagtggatgatcctggccctgaacagaggcccagctcatggccagggcaggtctaaccttatccaagtcattctgggtagggtgggtttgtgctggggattgacagtccccctgccctgagcctgcacagctggggccccagtggaaatgggattgggaacggacagtcttacctaggagatggagctgtcagagggtccatggcctggggacagagacaaaagtgagcacgagagtgttaggatagctgggcccctcctgcaagagtgtgtgggggtcctcagttcttagagaattggggagagggagcctttctcaggttattttaggggtcaagtaagcaagtgaggttgaggaagtgacccatgacccagagcccggaggttagggctgacccggccagttggggtttcctgtgtgatgttttatgggatcctctttgcagccccagggatagggtcagaggcccctgggtgtaactggcaggagtggacaacttggggctggcttagtagttcccagccacacccagactgaagggacactcaccgggggtggaggctgggggctgctgctccctgaagtcactctgatcgctggccctaggaaaggtcagggttatttgtgaaggtgcaaggttaaaagtcacaaattggagttaaaataggggaccaggaaaggagcctatttccaagaggggtatggagacctcctttctttatggagttctgtggtaggaggggcccaggtgaggggagttgaggaaaggccttacaaagccacatctgtcctggccagaggggaaggactctcaggcagatgctgggccaggagaacattgatccagtgacacaggaaagggactgaggacccagggaaggaatcagaccaccaggggttgcctgagaggaagggtcaaggcaccagggggaaagcagggccaggcacatgtgcaggacactgaggggactgcatgcatcttggattctcctggaactcagtgtccctgctgtgaccagacactccactcagggctggagatgctgaaatgggacaatgatcttgtcttctgtctctgccctttggcaagagacataaacgacattccaggatatgccatattggggccccggttctcccttctcacagctcagtgtctgcagttaccatgtcagtcaaaggggtgctgaccccacccagcccgtccaggctgttccagtctccactatgtgataatgcccaggatcccccctcagatgccctctcactgggtggatggattcagtgaacagggggaggtaccaggtattgagcaccgctcccccctgctccaggcagctgtggctttgctgtgctaggaaactaggaccatgctcaggggcatggccttaattggactgaattcactgaggacaaagctgttgaggaagcagcccagggtcagcagctggtgaggaaggtgccatggaatgagagggaaggatccctggggagtcgggaggctggggagagcctggcactgaatacaagacagggtctccttccttctcgcctggggtcagcgtgaaggatgggagcagaatggggaaaagctgtggtacctgccagtttttcggaggagcaggaaacacacaagtgcagccaccagaagactcccaaccaggaccccgatcaggatgcctagagtgttgtcatctgctgaaagaagaaggcaaaggggatgaggtccaaatctgttccagggggaaccatgaggggccttgcagggcaggggcatggtcagggaggaaggaaatgccatggagcctgagtgtggtctgttgtgctgtcctcatagctggctcccttgctctccgtggttgcaccattttctgtgtcttaggcttgaattactgggatgcatcaactcctacattctcccacaggaagcctgcacctcatcctgctcctgtgttttttagtccctccttcctctcacatcactcctcttccccctgtttctttttttccatcccatggcagtcgtaaagggcaggcccttgctgccaactcaatgctgatgagcagggatgatgttcattgactgttttcaggggccttccacatggaaggcacagtgggaatcaatctacctgcagcttttctcaccctcccattgccttgagggagaagggtatgtgatattgtgaaatacgtatttggtgttcatcaccattgatatggttaggctctgtatccccacccaaatctcaccttgaattgtaataatccccatgtgttatgggagggaccttgtgggaggtaattgaatcatgagggtgggttttttccatcctgttcttgtgatagtgaataagtctcaggagatcagatggtttcataaagggaagcttccctacacatgtcctcttgcctgctgccatgtaagacatgcctttcaccttccatcatgattgtgagacctctccagccatgtggaattgtgaatcaattaaacctctttcttcatacattaccaagtctcaggtatgtcttcattagcagtgtgagaatggactaatacagtaaattggtaccagctagtggagtgctgctataaagatacctgaaaatgtggaagtgactttggaactgggtaacaggcagaggttggaacagtttggagggctcagaagaagacacaggaaaaaagtttgaaacttcctagagacttgttgaatggttttgattaaaacgctgatagtgatatggacaataaagtccaagctgaggtggtctcagacagagatgaggaacttcttgggaactggaacaaaggtgactcttgttatactctagaaaagagattggtggtattttgcccctgccctagagatctgcagaactttgaacttgagggaaatgatttagggcaactggtggaaaaaaaattctaagcagcaaagtgttcaagatgtgacttgggtactgttaaaaacactcagttttatgtatttacaaaggtatggtttggaattggaacttatgtttaaaagggaagcagagcataaaagtttggaaaatttgcagcctgatgatgcaatagaaaagaaaaatccattttctgaggagaaattcaagccagctgcagaaatgtgcataaacaatgaagagcaaaatgttaatccccaagacaatggcaaaaatgtctccagggcatgtcagagaccttcctggaagccccttccatcacaggactggaggcctaggaggaaaaaatgtttcctgggccaggcccagggctcccctgctgtgtgcggcctagagacttggtgccctgcatcccagccactccagccatggctaaagagggccaaggtacagctggggccatggcttcagagggtgcaagccccaaaccttggcagcttccatgtggtgttgagcctgcaggtgcacagaagtcaaggattgaggtttgggaaccttcgcctagatttcagaggatgtatgaaaatgcttggatgtccaggtgaaagtttgctgcagaagcagagccctcatggagaacctctgctagggaagtgttgaagggaaatgtggggttggaaccccgacacagagtccctactggggcactgcctaatggagctgtgagaagaagaccacaatcctccagaccccagaatggtagatccactaacagcttgcaccatgcacctagaaaagctgcagacactcaacgccagcctatgaaagcagccaggagtggggctgtaccctgcaaagccacaggggtggagcccaaggctatgggagttcagctcttgcatcagtgtgacctggatgtgagacatggatacaaaggagatcatttcagagcattaagatttggctgccctgctggattttgggcttgcatggggcctgtagcccctttgttttggccagtttctcccatttggaatgggtgtatttacccagtgcctgtacacccattatatctaggaagtaactaagcttgcttttgattttacaggcttataggtggaagggacttgccttgtctcagatgaaactttggacttggacttttgggttaatgctggaatgagttaagactttggggaactgttggaaggcatgattagttttgaaatgtgaggacatgagatttgggaggggtcgggtggaatgacatggtttggctcttcttcacccaaatatcaccttgaattttaataatccccacgtgttgggggaaggacccagtgggaggtaactgaatcatgggggtggattcttcccatgctgttctcatgatagtgaataagtctcacaagatctgatggttttagaaaggggagttcctctacacatgccctcttgcctgccgccatgtaagacatgccttttgccttctgccatgatttcaaggcctccccagctatgtggaactgtaagtcaattaaacctcatttttaaaaaaattacccagtctcaggtatgtctttatcagcagccaagaccagctcggtcgcggagatcctaacccagcagtgctagaggaattaaagacacacatagaaatatagaggtgtgaagtgggaaatcagggttctcacaggcttcagagctgagagccccaaacagagatttacccacatatttaataacagcaaaccagtcattagcattgtttctatagatattaaattaactaaaagtatcccttatgggaaaccaagggatgggccgaattaaaggaataggttgggctagttaactgcaacaggaacacgcccttaagatgcagattgctcatgctattgtttgtggcttaagaacgcctttaagcggttttccaccctgggtgggacaggtattccttgccctcattcctgtaaacccataaccttccagcttgggcattagggccattatgaacatgttacagtgctgcagagattttgtttatgaccagttttggggccagtttatggccagattttggggggcttgctcccaacagactaatacacccattttctggtatgtgactctaaagtccttagaatcttcaaagtgatgtctttttcaagctaataattgactgatgactggcagcccctaggcaacttcagaatgaggctggtcactgacccaggtaggattagagggttgggactttcagcctcacccctaatccctggggagggacctggagtttgaattaatcaccaatgaccaatgaatcaattaatggccaatgattgaatcaattaatggccaatgattaaatcaatcatatctatgtcatgaaccccaaaaggactgggtttgaagagctgaacccatggaagtttctggagtgtggtgcatctggggagggcatggaagctccacaccccttcccacatgccatgctctgtgcatctcttcatctgcatcctttgtaaagtcctttattacaaaccggtaagcctaagtatgtgtttccctgagtcctgagagctgtttgagcaaactaatccaacccaaacagggagtcatggaaacctcaatgtgaagccagtcataagaagctctggaggcccagacttgtgactggtgggaaggtggtggcaattttgtgggactgagccctctgctgatatgtccaggtagatagtgtcaggatggaattggaggacacctagctgatgtacggtgcagaactgattggctgctgggtgtgtgggagaaacccccccgcatcacatttggtcacagaagtgtgtctgtgttgatgattgttattgtggagtgagagcagaggaaaaacacagtttgagtttttccaaacagggtggaatcccatctgccaatttagaatctgaaacttatagtttcagtacttcaattaagattgaagtacttcaattcagtacttcaattaagattcagtacttcaattaagattcagtacttcaattaagattacagaactggtaagtgaaagtgatacaacaaaaatgtaaccaaagtctgctcaacttaacagctaataacaacaaagttcataaaaataataccagtcgatattgatagcactgattgagccctggctctgtgcatgaccttgttaagggctttaatcgcattaatctctgaataaatatcctcacaaccaccctgagatccaggtgtttgtaacaattctacagatgaggaaactgaggcccaggaggttgagtgtcttgcccaaggtcaaatacctggtacctattgtaaccaggatgataactggatgagtctaatccctgagttcttacccacattgctccccaggctctgaaggaatctcatccttctcattccgtgtatcattttacaccccccctccctcctaggaaaatatacaaggaaaggagtgagaggggccgagggtcactcacattttacagtcagcttgagggggtcgctcctgttggagctgactgggttggagacctcacactgatactccccagcgtcctcctgcctgatggggtctatggtgagcatatggttaaaccaggacagcttcatcctcttcgtgacctgcagacgctggttgttgaaaatccactggaaagaggttccagtgttatttgtgtggcaggtcaggaccacggagcccttctctgtgactgtggtgctgctggcttggatggagggctgagccactgactctgtggatagagtgaccaacagaaagtgtcttggggccatgctgcatcctcagagatctcagagtcaaatttagaacattctcctgtgaataaaggagaaagatgaaggacagggaggagcagagagaaccagagacacccatagcagcgagcagtagggactacagtgacctcagagaccccagggaccaggaggacccagctgcctcagaccaggaccagggagccctgaaaaccctcccacagatgagcggccccagagtcacatgagatgcaatacctggggtggctttaggagcaggcagtcagagaaatggaacatgggtctcagcccctaagggacaaggaagaggtgtggccagctcctcctaggatcctacatccaggacccagtctgtaaagaggttatgattattcctttcttttttcattaattccctccctccttcatcagagaactactgagtgtgtgtctcagttgggccttgtgcaggtacagggtgtagtgggaagagaaagctgagtcctttccttcatcctcccatgggagtgacatcaacaaatcaagaaattcatgatttcacgtccagtgagggaagaaatgtggatctgatgggagaggcttggacaatcctggcattgagtctgatagttgagacaggtgatttcgttctaagtaaaaactgactaattctccatttgcccgtcattcctcagaccagaatctccctctctgagctgaggatgcccaagaagaaaggagctgaaccaacatctggtcctggggtccacagatgccccacggtggtggccacgaccagattctgggctgcagacacacggtggtgtgacgttgagcactgacagcctgtgtgatgctgatgcaatttctctttaataaaatggggtaaatgtcaatggtccctggcttgccatcctctctgtaaattaacattaaaatatttacaattacctgacctaaagcttggcacagaatagctccaaataaacatcatctattattattttactccaaaaaaaaaaaaaaaagagttctctgggcctgattcctggtggagaaggagcggtccagagtgtcttttctctgctttccctcctcctgaggacagtgcacttcccgggacatcttttaagtttcccatccagtttaatggcctgggaagtttgtttgtctgtcctctccactctgactctcaggtgaaagatgaggctctgcccttgcccagatggggctctgggggctgagccctgcctggtgaccagctctaggaaccacggccctgggacagctggtaaatcgttgctcacaatcagccctgcccaggaagccacaacccagccctggcacaggctccccagggtcatctggagtcaggatcttgggacaggggcctggggcaggggcttgaagggctgagcttctctcagaggatcctcaggccaggccctgactgagtcctataagatctttctcaggtcatgtctatgaggaggaggccaagcggggttggactgagactgattttcccccgctgcatctcccgcatcagactatccttcttgctgtagggaatttccacggagtccggataagggaaaggaattctgatctgttatagtttgtctcccctgggtgtgtcctgcactaaatgcccaaaccccaacatgggacgtaatgcagagggggatgcaggcacagcccaggcctgacaatcctgcgtatgtgaagcagaactgacccccaacacccagaggcacggaggaatcactcaccgtatacacggagatggtgagatgcctgttcaatctgagaatttctgtatgtgacttgtagggtgtagtatcccgtgtcctctagggtgacgttctggaaatgcagatctccactgggtgatattgtctctcgaccgctgtatgcaggccctggagtcctaacgtgagtgtctattacatatgctgcgattagctggttgggctccaccgttttccctttgtaccagccatagctgtaaagattctcgggcagataaaccacagagagatgaacattctccccttcagcaacttcaaagggcgctgatgcaataaagagccaggcagtggtgggtgcgttccagaaagttaaaagtgaggctaggaaagggagagaatatcagtcaatatttgacctatgcattggcatggaaagacggggtcctgggtgcaggtctcttcacccctcagccttagagggtgtgtgtgtgtgtgtgtgtcctactgggtcaaagtcagcagcatgaccctcattccttcagtacctctgaccttggcatttccttgtgtgaaccctctttcccaggggtctgcatggttccctccccactgccttcagttcctactcacacaagggaatccctgggagacttctttcgtgaagcctcctctagagaccctgggtcttccctttctgacctttcccagctctgttccctccagggctcttgtcagcacctgacctcacattctagatctctttgggtgtctgtcttcccccccatgagattgtgagctctgtgagggcatggacttgagtgatgttagttgcaccccagtgcctgggacaggctgcagactcctgtggatgagttcatgagcgttcccagggccttccatatcctggggtttatttgctaatgtctgaggttggcagatgaagacagagtttcatgccctggtggtgtttttatttaaattgtcactgtgatatagttttactatcattttcaaaatgtagtggccactgacaatgaacttgaaaacatggaccaactgagattgttttgccccttggcaattccagttcacttagattttttggttctccttagacgctctctcccctgagtctctaacaaaagccctctgtctcctctcagagccccatcctccccaggagaccccagccagtctctgtgctccctcctcccacccactcccagggagtcctcccctcacctgtgagcaagagcccctgccaggggatgcattctctgtggggacaagctgaggggggccccatggtctctgctgcctgctctgtcctcctctgtggagaggagcttgggctccaggaacgctctagacagggttactgtgactgttgtctctgctgtccttccttcctctatgctgagcttcctctcaggcaggagcacttcccgtttatgggcaagggcggggctctgcctacaatgtctctctgtcccctcccctctcagtcctgcctcccttgtccctcctttctccttcctttttgcctatatttggttccctaggcaaaactttgagaagcaacgctgatggggtcctcataacaggacgacccactctccccagtactgacctctgctgtgttctggccttggttctgtcacagccggtagattatttccctttgtgacacacaaaaccagctgggccctgggtctcctcatgctctccagtgctccaggaaggcagaatgatgcccagcaggaaagtgacagaggtggctctgggggctagaaaggggctcactgggtgatggctgggaaggacccacccgctatcttcagtgtcaccagcctggcctctgacccagggacagagacccaggcctggaggtctcgggaggatccccagctcctaggtgtggagggaggtgtcctgtgtgtcctgggaagagaggactttgatggaaggaggtgggaggctctgggttctgctgtccttggtgaaggtttcagggggaccctctccatgtctggggtctgtgcccccagcttaactctcattctctttgcaaatacatatattttgtggatctgcagttgcctgaactgtctcatgtccctaaatctttgtatccctttttacagaaggtcaggaagggtgtgtacatgagtatgaggactatctgatcagggcgagtgtttgtttcccaaagatctctttagatatggtataatacataagataaatgtactgaattagcaattttaagtgtagaattaaatgatactaattctattcacaatgttgtacaaccatcaccataattttttaccagaaaatcttcattataccaaatggaaacttcatacttttaatcaataactccccacttccccctgccccacccactggtagcctctgatactatcaatctctgtgaatttgcctagtttacatgtctcatataataaggaattatatacgtgtattatttttttctggattatttctcttagggtaacacttttaagattcatccacgtcgtagcatatattacagcttctttcctatttatggctgagtaatatcccaatatatgtttatacctcaattttaattcattcatctcttaatggacatgtgggtggtttccacatttttgctattgtgaaaaccgctgcaatgaacttacacttggaagtatctgtttgggtttctgtgttcatttctttgggggtacatataggagtataaatatggggtcatgtggtagttctatgtttaagtttttgagaaacagccaaactgttttccagtttgctgtgctattttatattcccatcagcaatatacgagggttccattttctctacattcttgtaaacacttactatttaatattttttaaaacttatagccattctagtaggtgtgaagtgatagctcattgcagttttgattttcatttccctggtggctgatgaagttgagcattttttcatgtatttactgacaattttaatattttttagagaactatttattcaaatcatttgctgtttaaaaaaaatgggttatctttttattattcagttgtaatagttctttatatattttagatacaagtcccttatggggtacatgatttgcaaaatttttctcatattctgtgtcttctcactttcttcatggtgttctttgaagcacaaacatttttaactttgatgaagttcacttatctatttttaattttgttacttatgctcttgatgtcatattgaagaaaccattgcccaatccaagatcattaagttttactcctatatgttcttctaatggtttgataagttttgctattccatttaggtttttgaaacattttgagttaacttttgtatgggctgtgaggtaggggtctaactacactatctcgcatgtggttatccagttgttccagcacaatatgaagaggctaccattctttccccattgaggaatcttggcacccatgtcaaaaaccaatgggctgtaatggtgagggtttatttctggactcttgattctattccattgatctctatgtgcattcttgtgccagaagcacactgttttaatgattgtagtgttttagtaagttttcaaattaggaagtgagtcctccaatttttttttccagattgttttggccattctggggtgacttttaaaaaagatgtagttcaatggttctcaaagcaggagtggttcagctctccttttttggcagtctggagacctttttaggaccttaatctaagtagataaattattcccactttcttttctgagttgctatgttacagtgtatattgacacccatgaaataattgagagaccctggaagtgcttgcctacatagtgagggacaattagttccatgatcatgggcacagaagattttgttttgggaaacaattttgttggtggagttatattcatgcttactcttttatttgtcttcatagcctgcatctccttcagacttcatatctgtttattttcttgtttgtcctctggggtttgggtgttgggtgaccagtcagctggagctggaggaggtgcttagcaaggcagtgaccctggttgggaggagcagggctcagcagggtgaaagtagctgggccttgagtcaggagtggcatctggaaggcctgactgtaagggtcagaagggccagcaggtgggtgtcctaggcacaaacggtggctgctgctgtggactggaggaaggtaagaggccccgagtattccatgttcttactggctccccaactgaggattcctctcctgggctggtgctgtcctgcagcagggaggggttagacagggacggctgcacatcaggccggagtccatgtcatcctcttaggcactgtcactacagattgaggattctgttcataagccaagcctttgcacaaggaagggacccgggctctcaaggaagagcagctcctggtcagacctccatctccttctctctcattgcctgaggcctcaagcttggtctacctggcacaggggtctggatcctcctcccagggttggggtcttactgagctgggcacctgcaggtgggagaagatctggaggggccccatctgccttcaccagattgatgttgagggtccctgagtcctgcaccactatcaggtgctgagcaacttccagtgtcagtgacaaccaccccatggtggaagcagaaccacctcgtgagaaagcacctccaagcctcagtgcttgccatgtgtgggaatttgctggtttcagttgggggcatgttggtgggtggtcatgaattcagggccggattctatgctcacagtgcacatgctggatgtggtacagaccccaggcagggctcagtggggtggttttgggtgtgcacaggtatcttttctggaggagctggtggtgatttggctcccagaagttcctgagctctgcagactcaccaagcactcaatatttgagtgaacattgggcgagagagcagaaggtaagtgtcagggcatcggggttggtgcctctgggaagaggaggaacattctgggaacaaagctctcccccggcttacagggagcttcccatcgctcctgccttgaggatcagggaaactagggcctctgctcttccaggggctgcttgcaggcagtttgctctgggagggggtgacccaggagttgcctctcattttgcatttgagatttaaaaggagaagggacagtatatcttgccaggtcacaaaaattacaggcatcatattgactgaagggcactcctgtcatcactgcaatataccagaatggtcttttaaaaaaataagtgatttaggtttaccagcaactgtaatgcttgttttattcttctagttcaccgttaatgtcacttttgtagttttagcactggcaatgttgattttatgttgactctgatgattttaagctttcatttgttcacatagagatcatcttctttctgaatattaatgcattttttctctatttctactggttattcctgtacatagagtagagaatcacttttcccaaggaggtggaaagcttctgactaccaaaaaaaaaaaaaagtgtcaaaatgctttaaagtcagtaacttaaagatcaaatccaagagtgggcaacagattctgcccagggtctgaaaggtggagaggtgactggtgaggatgtttaaaagacctctcctctctactccctaaatgggggccatccagtgttcttgaggttcagagaaggcccagggctggggcagcagggcactgtcagctcccagctcccaggggccaggagtaagaccccaacactgtccagacactgattgcattcattttgggggagagtagattcttatttaaagaataatacaaaagtctacaaatatgaacataaacagaaattcctttgctacaattttccccttaataagacattccttcctaatgacatatgtgactgcattcatggctgagatgttttctaggatggtgagagcatcagagtggactatctggtgccttggggtcatgcattttcttcttccaatgtctacaggatcccccatgtcccactttgtagtgtaactcagtgtgtgtcattctggtttttgttgtatagatccttggaaagcccatgtcattcctgctgtgaggtacaggcagccaaatggcatcatctctaaacatgccttctcctggtacatcaaattatggaataaatgaaagccattttgacagatattgaagatataagtttctactcttcccacacatgcttctcccaagtgaaggattttactggtgaattgttattagagattagtgtggatcagtgactctgccaggggaaattttgccctctaggggacatttggcaaagtctggaaacattgttggttgtcagagctgggggagggagtcctgctggcattgagtgggtggatggtgctgaacaccctgcagttcacagagccccaccagtttgaccacccaaatgtcaatgctgaggagtggagagccctgctgtgccctcccgcagcttccctgaagcttcccctcacctgctcctcccatgtctccccaccacttccccacttcacccgcctccttacacctcagtcccctccacctgaactcaccccttagtccaaggccagccctgatctccgctctcctggtctccttgctccttagcaggaggcgcccactagatggcgcccttgcccttactggagctcaccgtctccctttccaccctgagacaaatgtggctgcttttactgccacaaccccagccctccacactctagatttgctcagggagcagctcctggacagacctcagggaccccagggaggagcctcactctggagattttgatggcatggtctttgaacttcactgttacccccagtcaggatccaggatgttgggagtgcatgattctgcccggtcccacttcagcaggaccccactgctgagttgtctgtggggacccgggcctctcatctccttcttgcattgcaggagagggatcttagcactgctttcacataaagtcagataatggaggagtgcaggtgagtttgggaaggtggacatgaagagaggttgtgtccctagaggtggcagcagtgagaggatgggcaggtgggaggaacacagcccatccagggttgccagccatattaggagcgacagcctttcctctaagcctccagcctttttcctgaaacattccagaactttccacttcagcacttcccactgaggctcctcaggtctgtccctgagctcccagctgagcctacctacccatctgaaatcctgagtcctgtgtcaccctcgttccccattattctgtgcagttctgtgggacgcccagctctcctgacacccccagtcttcagaatggccatcagcgctgtcgctgtggcaccagggtgactgccgcctggaggctgagtcctggcttcctgacagctgtggggcccgctctaggctcccttgtcctgatcattcatcacctccaggatgcacagcagctgggccagggggaggagcagggacaggtgtcagccaccctgtgtgtctgcaagtcaggctgggggtgtgggaggacgccaggaatgactgaactttctgatttagagggtgagagcttgcactgatggaatttgggatttaataggaaaagcatagcgttttcctattttgtaggcagggtggctggagtttggaatcatagattcccctgggatgtcactgtggacctcagtcccacccgttaggggcacagatttcagaatccacaccctggggcaaagcaggcatgggaggctccatcagcctggccagggctctctatttgtgcagctgctgcaaggagatgtgcactctgatgggaacagtgctccctcctccttggggggcagtatctagctccctgcagcccctctccctgcaggccctgccctctctgaacctcaccttccccaacccgccccccgcaatcccatctcagctgtaatcccaacactttctcatccattatgggtggactgcttgagcccaggggttcaagactatgctggctggacaatatagcgagttgttgtctctacaaaaagacaaaaattagctgtgcatggtggcatacacctgtagtcccagtcactcaggaggctgaggtgggaggattgcttgagctggggaggctgagttggcagtgagttgagattgtgccactgtatacttcagtgtaggtaacagagcgagaccctgtctcaaaaaataaaagtaaaaaaaaaaaaagaaatatggaatacattattgttaactctaatcaaccatgctatgcaatagtccaccagtaataccagtaatagccaataatgaattatctgaaaaagaatacaatttattcttagctatctactgctaaaatttttaagctatcttttatgatagctgaaacaaaagaagtaaatttaaccaaggaagtaaaagacctttataatgaaaactgtaaaacattgatgaaataaattgaaaaagacacacgcacaaatagaagatattccatgttcatgaattggaagaactgatattgctaaaatgtccttaccacccaaagtggtctacagattcaatgcaatttctgtcaaaacaccaatgatattcttcgaagaagtagaagatcctaaaattagaaaccacaaaaattcctaaaacctgcacaaaacaccctgagttgccaaagcaatcttaaacaaatagaacaaagctagtggcattacacttcctgacaatcaaagcatactgcaaagctatagtaaccaaatcagcatggtcctggcataaaaacaagcacatagatcaatgaaacagaataaaaatcccagaaataaacccatgcatctctagctaactgattttcagccaaggagccacatgcacacaatggggaaaggacagcctcttcaataagtggtgctggggaattggatattcatatgcagaagaatgaacctagaccctatccctcaccatgcacaaaaaattaactcaaaatgtattaaataaagacttaaatgtaagaactgaaactatgaaactactagaagaaaatatagggggaaaatccatgacattggtctaggcaaagagtttttggataaaatctcaacagcataagcaacaaaaccaaatataaacaaacgggatttcatcaaactaaaaagcttttatacagcaaagaaaaaaaaggccagcagagcaaagagacaacctacaaatgggaggagaatatatttgtaaatatatacatatatatttgtaaatatatacatctgataagaagataatatccaaaatatataagaaaattatgtttctgtatagttttatctgactgggatacagaggccacatccacagtcccatcctcaaaggccacttgttcccaaaatgtcaagcacatccctcaatgatccatcatcaacacctatgtctgtaggatgaagggtgaatcatgaagcactaaaaaggaagaaggaagccaatcccaaaacaaaatgatgcagggtctggaaagtccaaagcattttttttttttttttactgcatcttcctcctttcttctccacattcccaatcctcactattgattaacaaaacaaaaaaaactgggacccaccatcttccctactgtcaggagatctagcgagattgtttgagtcttagaccaaactttgccataagccaaatttctggctgactttacaatgatatgagctagcacagtctctttttctgccagtcaacttgtgctcggttttatttgcaaccaaatagaggtggtaaccaaatataggtgaccctaaaattagtcatcaggatgaaatcctaaaatgtgcaacaaactgggttgaattcaggattagtagcaacatctctgttgtgggcttgaaaagggggcacccttttatgcagtagcaaaattgctaaattgttgtttgctgagtctttggactctcatcccggattttctatgaccattcaaacagggctgcaatgaacatctatggttgtttagcttggcacacttctacatttctatatagtaatatctagaagtgcatttgctcaatcacaagatatgcacattttataattgactgctatcgaactaccttaaatagccttaatttgttctcaacattgtttaacagggtctgtttaatgtcctacgtccagcaaggacagtatcacttttcttaatatttttcaaattattggaccttaacaaatacttaatgtgcaattaattgattcctttgtattcccatgccttcttttatatgtttccttatagtacacaaaaccacattattgtttctttacttgtgtcattccaccctggaccattcctatctaaactataacattatgagagagagagagagagaaaacaatatgaaaatataaattgattaatcaaaaaaatttaaataggacaaatcaggaagacacaagagagattttaaaattattcagagaataccacaatagctgtaccaatatattttaaaacttagatgaaacggacaactatctcgataaatgtaaattaccaaaactgactcatgaaaaaatggatattatgaatagagcaataatcagtaaagcaattaaaaagacagttgataatttttatttactgacaacaataacaaaatttcaggtcctgatatttttatggtgaattttaacaaattttcaagctcctcctcaaccaattctcagaaggtttaaaactttaacaagaaaacactttctaacacattttcagaagctgttatagcatgataccaaaaccacacaagaaaattatagaccaatctcacttacaaatatacatgcaaaatcaaacaaaatcttagtgaaccaaattcagaattaataatagcaaacaagcaaaatatgttatcatacgtatggcttatatcaggaatgcaagtatgtttcaacatcagaaaatacttctccacattaacagactaaaggagaaaaacgcttgtttaattatctcaataggtttttagagaattttgaaaattttataaagttatgcgtattctgtaaaattgatgaaatccaaccttgatttatttttaaaaattgcctttcctatagaattataggtaaaggaaacacatgcatcctcacagagctacttcaaggctaagttacttcccataagtaacgtatcctgtaatgtgtgcttggcacatattcaatactaaacaaatatttgcaaatcctcaaaccacttctcgctcaaataacccacctttgtcttttgcctttatgttagggttgattttctcaattgtatcttggagatcctttggtgggtctttcagcaattaccctgaatttgcttttctgtttacaattttaattcctgggaactctttcttgttctctgactgcacccttttcatgagagttcagccatcaatcctccagaaccccaccccccccgcccccccaaaaagcaataaagatgtctaaaagcttccttctgggctttcgaatgatgtttaccccaggcatttgttctattcgttcatcacccattttccctacaacttgcctacacttgatatcagatttttatttattagtcacctatcttcttcattggcccattttcctattttgccactggttgttctcaaatgtgttatgattcctggttgtacagtcaagtggttgataatcttggatatacgataaagatttgctctgtagctgtgtgtaagcctatataaaagcttttgtatttttcttcttaaaaaagacaaaagatggttgggaagatccctccagttcaccagttcgaggctgcagtgagctatgatagcgccgctgctctagcctgtctgtctgtgaaaaacaaggggggcggggggcgggggggaagactggagatgtaaatctcccgcagggccctacccgtatccgcaacaggtctctaacaggaacagcctcaggcctgtgttggaacaaggtaggttacagaaatctggaagccagatctgtaacttcagggtaaggactggctctcagggctgatcccccgggctgggtgtcccagaggcacccgcccccgccccttccccaaggcaggccaggacaccttcactcctctccttaggctccccacccccttctcctccccactgtgcctcctggagtagcggtggcggtgccacaggggagcggggcggggcgggctctgagggcaagggggatgggccccgccggggtcactggcggccaccctggaaactcgacgcaggccggcccttctagtgaatcgtcccagccacagctggcctcccagccgcgcttggggcgcctcggggcgcgaatggtgcaggttggggagactcaccacgcaccgtcgggggtcggtccggttattcctcaccgctcggctccagtgggcgcgcgggcctctcctcctcagttcctgcgctgcagtccctccctcacccttcgcagcttgggaatccaactgtgtcattccgacggagcgccgtgaggacctccgagggtgttagcgccaagtgatctctgtccagcgctctgaatatccaagtaaaggagttcaatgaagggcgggtcaacggaggagaaaccgtgactctctcaagggagcccaaggcctccttgtctaattagtgacgcgccaatggatggaggctcttcccaccatctcttcccagcatccagtgacaccaccgccaagggacgggctcggcggaacctgcaggaaagaagcatcggctgagcctgactgcagcgctgtgaagagacaggggaggggatcagtagttggtcccgcgcccaccccctgtttccgcgaggggcggagttgactggccatgcaggcagagggcgaaatgtgaaattccactactcctaccgtttttccctgacccgatggggcggagtgtcgtcaggctaagttccctggcggtaaggtggggagattgaggcgcacacctgccgaacggtaacgcaggattagctaaggcgagctcaggacagaagcctcccgaggagcaggagggcaaaataataaataaataaataaataataaataactcactccttggtctttatttgcggcaggaattcagaaggtgaaagcggggccttaggatctttctgaccttttgggttttaagcaggaggtgtcagaaatgttaccacagggctagctggcttgtggccagcaagcgttcacaatgccctcgatttttcatccctctctgtgggttctttttttcattgtaaggcagaatttctacgattgctcacccactcagagaacctgagctggtttagaccaggtgagacaggctaggtttaccctggtgatgatgtgttgttgccatggcgatcctgcccagtaccagaggccctgcagattcagatgcttggtgcctgtgcttggctgaggggccaatgggtgaagctgccatctgcgggatgatgactgaagcctctaagtcagaatccgcccaggctgagccttagggcagctccatggagcctcggctggcctgggatagagagtccaccactgtgccagcccccagccactgcctaggtcctgtgctgagagccccttgtccagggaaatggcgtccagtggaaaagggaccacccccttgcccttcactcaaggcaggttggtgacaaccctgaagctaatccgttcctagaggagctgcttctgggtccgagttttctctgcagcagagcagctccctggatgggatctgttcaaagtccgcctttcacgcggaattttccgtccttgcaattttccacctccaccactaggggatcctctctgaccgcctcatgccggctctggcctctgagcaggggtttctcttctgcatgtgcgaccttgcgcatgcctagtggccttttgggacctagagctgctccacaccccgatggggttacagagtgcctcgcctccactccaccccaccagggttccttccctggctgggatgggatttcagaagcgccgaggaacagcccagacaggtgtgggagagtagccaaggcccctgtcccggggtggccaggacagcggtggcctcgcataggacctggctgggctgctgcaatcagtgtcctgccccttggagagcaacagtgaaaacaacaagactatcttcacccaccttaagaaagaacagaaccagtatccccaactctgctgtgtatcccaacccaattccattccccaccccactctcagtagccaatatgcaaaatattagaatactcttactgttattattttcaaccacactctgcatcctgaaaaaccatatatttcgttatgtgcttttaaacttcttgaaaatgaaatactgaggctgggcgcagtggctgacacctgtaatcccagcacttcgggaggcggaggcaggcggatcacgaggtcaggagatcgagaccatcctggctaacacagtgaaaccccatctctactaaaaatacaaaaaattagccgggcgtggtggcgggcgcctgtagtcccagctacttgggaggctgaggcaggagaacggcgtgaacccgggaggtggagcttgcactgagccgagatcgcgccactgcactccagcctgggcgacagcgccagactctgtctccaaaaaaaaaaagaaaaaagaaatactgaattttcaaatacttgctttttttttcggtcaaaattatgttctcaaatttcactcctgtagatgtgcgtggctggctgtagtttttgcatttttattattaggtattctcctgttgcattaatatgccacattttatttctctcatgtttttggtgaccacttggggtgttttttggttttgtatttttgctgtatacatgctgccatggtggacatacctctttatacatatttcctgttgtatgcagacacaattttaggatgtgacatcttcagcttttctattgtgtcgtgtgtcttttccttcgtgctttgtgttatttacatattctggacacagattctttgtcaactgtatgtgctgcacatctctttcccagtttgtgtcttcttcttcttttttttttcttaaaaaaaactttctttatagtgttttttttttctttctttctttgttttgttttgtttttttgagatggagtcttgctctgtcacctaggctgaagtgcactggccgatctcggctcactgcaacctccgtctcctgggttcaagtgattctcctgcctcagcttcccaagtagctgggattacaggtgcctgtcaccacacccagctaatttttgtatttttagtacagatggggtttcaccatgtttgtcaggctggtctcgaactcctgacctcaggtgatccaccctctttggcctcccaaagtgttgggattacaggcgtgagccacagcacctggcctgtgttctttcttaagtagatgttacttttaatataatagaatgtatcatattttgcttttatattagtactttttctatctaattcaaacacatccccaagggtctttgtgtgtagactgaccaatttctcaagaatcatgaatgaatactgcttctctttccccaatttatctgtaatgctacctttattataaagtttctatgcatgtgtagaaatagttcctgatttttcactctgtgccaccagcataccaatagcacgctgtcttaaatattaaatagcagagctttatgagacaacttgatgtgcagtaggcaattgcccccttgttactcttcttcagggttctttgttgtaccacatgaattttagaattggcttgtccagctaaaagacaactgcaaggattttatttggaagttcataattctatacataatttggggaaagtattttcataataccaagtcttcctattaatgaacacagactctctctctctctcccccacccccacctgtttagttatttatatctttatggtctgttagttattgtttattgtctttcaaccaggtttcatgtttttctacatagaggccttgcatgtgaaagtctttcttcctagcttgctattacaaattttttttaattgcactttttgggtacagtggcttgtactgtaatccccgatacctgggaggctgaggcagatggattgcttgagtccagaagttcaagaccagcctgggcaacataatgaggtccctgtctcaaaaagtttgttttaaaaattgcatttgctgttattcaacaaatgtcattgtgtctcatatatggatttttatatctgataaccttgttcaacaatcttttgattctaacaatatatcagattcttttgagttttccatatagacaataatgtcatctgtaaattataattgtttcttctttgttatttcttggaccttttattttatatttttgtcttgctgcaaggcaatatccctctatatattgtggggtcttttttctcataaagtggggatggtgaacacccttgtcttgctctctgattgtataaagcatgctttctgtagcattttgtagacgctcttttttagattgaggtaattcacttttatttctggtttactgagtttttagcataaattcaggctgaatttgagctaaagctttttctggagacatcatttgaaaaattcatatgatttactttctttaagtcaccaaagttatgatttacattgaactgagtttctactgtttaactgtattcttgggagaaaacccacttgtcactgaacaatatctgttttatttactgctgtcttgtgtctaaattttcttttaggattttttgtatatgctcagattagcctgttattctcctttctgtatttttttctggtttgggggtcaaagttataatagcctcacaataagagctaagaaaccagccctaatggaggccggggcaggaggtttggagttcaagaccagtctgggcaaaatagtgagacccccatctctatgaaaaatagaaattagccaggcatggcagtgagtacctgtagtcctaggtacttgggagggtgaggcaggaggattgcttgagcctaggaatttgaggctgcagcgaactatgattgtgccactgtactccagcctggatgacagagcgagaccctgtctcaaaagaaaaaaaaagaagaaataaaaaggaaaagataaaagagctaagcatctgtttccttttttccattttctgggagagtatgtgtaagactgtaattaactgtttcttgaataatgggagaactctgtaaaataatctggctttggtgttacctgtattggaaggatgaaaaataccaattcagtttcattattggttgatagggctactcatgctttttgttttgttttgttttgttttgtttttgagaggaagtctctctgtattgccctgttgtccaggctgagatgcaacgttgttcacaggcctgatcctggctcactacagcttctaacttccgatctcaatagatcctcccgcctcagccttcccagtagctaggactacaagcatgcagcatcacatccagcctcttttcctgcctgacccagttctggtttcctttagttttctaggtgttcatccattttatctaatgtttaatgcatttggcataagggtgctcagtgtcctttcattgtctgttgtctgtaactgttgccattttcattcctatttatgagtactggcgtcttctctcactttttcttaataatcctgctggaactttgctttttaaagaacatcttttgacttgttgattcttttttcatacatattaactattttcttattttttgcctttatatttatttcttttcctgtttgaaacattgctcttttcttactataaaaatgggtaagtagctcatgaattaccacctcttttaaaaatcttttctactgtaagcattttagcagtttacatttgcccacaagtaccacttcagctacaccctatgtgcttttacataaagtcttcatttttggtaagacatattctcaaattttaattatcacttgtttttaaatccatgatgttttatttgaaatgttgtttctaaagatacattttctggttatacttttattcttctaatttagcacagtggccacaaaacatggtctgtgcagtgcatacaatcgatgagtaatttctgagctgtagtatttggcataatatatggcaaaatttcctaagttttccatgtgtgctttaaaaaacttccagtaaaatacataaatctgttagatcaagcttctcacattgttcaaatagtctatatgtttactgattcatttgactgcttgatttatcaattacaggtaggaatgtattcaaatctcctattaaagtgtgacactcaagtggctttttaaagacagagatgccaaaccaatgaatacatgattttccccaaagcctgcacaaattctctaatgaaattttaccatgaaagtttgtttaattaaggcttactaaagcagtatgttgtcttttactttttaaacagagaatatatattttaatacatcgtttaagtttatgattaattatctattactgaggataagaatctttgcctgtgctcattcagcatttgcacttcatttatgatctgccttctcatagcttctgttaatttttatactagagacatttatttgtttgtataaatgttgaaggtttttttttgttgttgttgtttttgagtcagagcctcgctctgtcacccaggctggagtgcagtggcatgatctcggctcactgcagcctccatctcctgggttaaagtgattctcctgcctcagcctccagagtagctgggactacaggcatgtgccaccaagcaaggctaatattttgtatttttagtagagatggggtttcgtcctgttagccagggtggtctcgatctcctgacctcatgatctacctgcctcggcctcccaaagtgctaggattacaggtgtgagccaccgtgcccagctgggttttttatattataaggagatgtaatagatagatagatgtttcaaagatagtcaaatgtttttaaaatttaaaacacttttttacaggttgactttcaccatttaatttcatctatgtgttttgccttagagaaattttaaatgctatgtagatctcatgacttataattatgaagcattttgttttctgttttccacgaaacttagcttaactttgagcatataatagttgtaaaggtaggagagtaacactgaaaaaaggaattgcataaaaatggcacattttctgtagagttgtttatcgcctgaaaataggccccatttcatggaagtaagatgatcaggctcaggtccccagacgaaactcttggcatggtttttggagatagtccagggctcagtactggctctatcatttgctacttctcccaaagtaaccaatatctcatccaccctgagcccatttccatatctctaacatgaggataatagcatctaccttacacaccaagtagagggatcaaatgtaggaactaaatcaaagtaccagcactgaataacctacatcctcccacttcccaaaaggaagagagatgtatcccctgttgacaaacgagaccattttgcaggagagaaaggaaatgccagttcacttgcaatgtaaacatgctctctctttttagggatgtccagggacctgagagagaacccatgcttaccaaagagtttctagttccagacacacaggactcgaagggtgacaagtatggttttcagggtccctgaatccacccagtcctcacagaaactcctaaaagctgtcgattgacagcgttgagttcacagctctggtcctcacatgctgatactgcttgtgatatcgaacccgacaggaccccacatcacaattgatttaccaactacaatataatacctcctgaatctccaaattggctcacccaggaacaaaggcttggggtaaaactggattaggagatataagctctgaattttctgagggtgagacacacaaggattctaagtgacacgccacagagtaacgggtctgtgactggaggacccacagatttgtcttactggagacaccacatgcacacaaactccatccttagctgtggaaacaagggtcttttgctatcttagccgaattctgggagtaatttttggaggggaggagatctttgggattgcctctttcaggccctttacaaaaatacctacttcttaaatggtaaagcttacactaaactgaaaaaattacatccttggctttttatgaagtaggtgttggattgaatcactactggaagaagtatggcatcgcaaattctaagcagtggtcaaaggatggatctgttaaattagaaaaatctctaaatttataaaaagattttagattcctttattctaaacaattgacctatttgtactcatgggacaatcaaatttcaaaggagatatgtaacgatttcatggcttgcattaaaaatccttctgataaaattaaagataaaaaatctgaccccctgccaaaaaaatcttttgaagttcatactgcctgctttcaatattctgtgggattcacaatgaaaggtgccttatattgtggcctagcttcaagtttatgccttcgccaccatggcctgggttcaattcccagtcagggccccagcgcctttggtttaatgtttgcgtggcatttgacttttttacctatttagtattggtgagattacctttggtaaaaaaaagtttaaagagtggaaatcgcaattctttgtgttggctaaaatctgattataagagatctggaaggttttatttttctttttcaaagagctctatggtcagaagtcggcttcatgaaaagctaatatttaattatatgtacatacagtctttctggattttctcttttgcctcctgttttgaaaaatatttggatttgagtgaaactccgttttagaaattaattgcttggtacaatatacccatgtaactaccctgcacatgtaccccctgaatctataataagagttgaaattttgacaaaataaaattagattttgaattaaaacaaataggtgcttggttcctctgctcacttctttttaaaaggaattcctctcccatgtacttcttcttttcccttctttaccttccttttggcatctttggtatcacatgaagggatctagagggaattttaagtgactctgaaattccttgagaaatacacaaaaagatcccactcaccccttttgggggtctcctgttctccttgtggagtccagagtcagggacaggctcctccaggtctgcagctctgctctcttttatttcatcttggctgattgctttggttttgtgagtaccaggcattactttgtactgtgagagacacgtcctttgtgagtgcaacggctgctgggtcactggtgagggctgcagtttggagatggctgagagccgttgcaataaatggttgtgattgcagggggctccttgtttctttgcaagtttagatgagaaaggtgcagtttggacacagtttaaaggctgtgaaaacaccaccaatgaatatgatttcctttggggatggtctgattaaaagtgggctgattgttgctgtgctactagccttgaagacatgtttctacagcattgtgcagtgtggaaaaattgtgtggcttggtcttgtggcatgtcccttcttttagagacctcagattcaatgtgaaattcgggatttttgattttcaaagatctagatgccctgccttccagatgtgcctactcttcacatattttaaaattagatcctataaactgcaaatactttgttggcttctgtgagatcagaggtccagttagaaaaggaagacagtttgttaaaattaaaaactatttatctaatctaactagattggcctccaaatatgactttctgacattcagctggttactctgaaaagatttctaaatctcttgaggctcatctatatgtttccttgcaaagaaaaaaaaaaaaaaaaaaaagcaagcccaagcactagtaagaaaaagatttgcaatgtttcatgaaaggagtagatgagtgaagcatttatttgtagatactgggttggatacctgtgcaaagaagaagaggtcaataataaaaattgccaggggatttcttggaacttaacaagctgaattaaatatagaaatgtcaggaaatcaaggcaggaaatactcacttgtggttaggcagacagggcagggttctgagcttgagatggagcaaacagttgtggtgggtgaagttcacatgctttagagctcagctgtcctagtaaagaagcctaagagtctctaaagctcttatgagaagatggattttttttgcctagattaaaaggttaaagaattgctttaagttggataaaataaagctaaatgtttaagcaagttgtgaaaggtttatgaaaaaattaattaaaatatttttgtgtgtaaacatattgactaaagttgaaggggtataattcagcatttctgtaaattgagcattgaaataaaaacacaatgggtttctcttagagcactaacctgctctttaacaaaaattgtaaagggttatagaaagtctataaaaatgttaccttatggtcaaacattaaaattgggtaaatatgtctatcaggttttattaagaattaggtttaacattaatagtacactaatgtaaaggtgaaatttggcttatttggtacaaaaatcatacaggaagcattgtgaaatataaaatgatttttagctttctttgggctatatttctataaatatgttattgatgagggttccaaagttatgggagactcctataattctgctatatctcagtgtacattatcagtcataattataattgtcatgttaaattattgtgggccacagaggtaacagatttccttgtcaattgtgtctttgactatgactaccctaaaacgttcagtcacccatatacacatgttaccttgttttggccctctttagaaggtaattttataatcagctataaagccctaacaggtgctcttaaatgcaaattttgataactttggagattgtgacatcagaagagaggaaaaatgttcgggacacttggagagctaaaatgttcattgatatcaagcaggacaggaattaactgcatgaagtgaactaataggaggctgaagtgatctttttgactttttgcttaaaacgttgctgatcctttgttttgcttttcagagtcaaggcaaattttcttttgagctattgacagcttttaacgattaatcaaaatatactcctatgaacaccatttggagcattatttgtttctctctacccgatttccccagaatttggaaactatttgtgggtattcttaatttatggcaatatagttatttgcataagtgcaataagaatgtgttttctttggtaacaggacacaatttgaaaaactggttattttaccaaggttttgaccagaatgctgtgctttcctttaaggaatcaaacttgacttgtggagctaataaagcctttggaaaactgaccttatatcctgtgaacacagtccctgtacagggttactgatctgtgggaagaaaagaatgtcacattctgacaggtcaggaatcccaagttatcttgaaacttcaagaggacaggaattcacccaaccatatgtatttgatggtagaaatccatggcaggggctcagctttaaaaagtcttatctcagattccttctataaaacaaagtcccattaaaaccaattttaaaagcctatgtgaaaaataattattcttgctgcacctcgtacaaataaagtggcaaagcataataaagcaaattggtcctgtcgtaatttgtctttagtaaaaacgggaaactggggtcgggtgcagtggctcactcctgtaatcccagcactttgggaggctgaggtgggcagatcatctgaggtcaggagttcaagaccagcctggccaacatggtgaaaccccatctctacaaaaatacaaaaatgagccgggcatgatggcgggtgcctgtaatcccagctactcaaggggctgaggcagggaagcggaggttacagtgagtcaagatcgtgccacttcacgacagcctgggtgacagagcaagactccatctcaacaacaacaacaaaaaagggtaactggagagagggaagttatgtttcaaaaacttttggaaactatagtacacctgtttttaaattctagtctggcattcagtttttattattttctacagtttgggttaaattcgtatttctctggctacaagtctcctaaataatcttttcatttgtttcctttttctttccctttttccccatttttcttaattggaaatcactgaaacctaagctgtgctttcttaaagccctgtgaactgaagactagacaaccgaaacttctgaaggaagtagcagcaacctatttatatgtgttgctgttgcctactattatgttttagcaggtgctgcctctacacccccgaaacagagagtgctactgggaacaaatcgactttttccactccagtgctgcattcggtgccccataacgatgaccccctctcagcaggaagtagccagaaagattacaatgctccatctccctatgattcttgtgataaataaatatacaagcatgatagaaatcatgcgcaaattgacagtggggattgtggcaggccagatttcactaatggaggtccccatcacaactacttcagtactgactgagtggttaagttcagtatcaaaagctgaaagtgccagcgcctttctacaaaggctagaatgtaacaaaagcccaccaagggttttacctaggcctttcctgggccttacagcatgacaaaacaaagaaggaattcttaaccagacctgtttaggattaaacaaatttaattgggggtctgaagaaactcgccaggcctccacaaacaagttcattgggggtctaaaggaaccccccccaaacctctgtgattgagcaggagacaaggtcagggtaattgccccagcacctggactcatttagatttaagtaaatgtactgaggctccagagaaaggtctccaagacttagactagagttacagattaaaagaagttaatcacttatatctttagataaatgcacactgacacgtagacatacatcttagaaaatatataagctctggaaaaccttgtaatttacagttggtctggagatattttctgggccttctctctgtaaccggttccagaaataaaaaactctcttcctccccagtttatctgcatctcgttattgggccgtgagaaatagcagccagaccctgagtttggtctgggaacacactggctgggcttcctgcctggcggtagagcttcactgtcctccttcccagccaaaatgtggcccttgaaggcttcctccccaactgaccggttttgggttctaggtactcagggaacaccgtcttcaaggaggccattttcatactgttcctggtttgatttttctgaaattaggaaatgccccttgaggcatccaggattgtctttatttcccctgaagcttcccctcctgaagaaaaaagttctcaaacaccctcaggactcaaaccccaagttcaccctgtgaaacattcccatttcctaaacccaggcaggctcatggccctcagcctctcagaccccatggaaacctcctcccccacttcacgggttctctccatattgagagcctcccctcctcggcacacaacccagagactcaccccaacatgtgtagcaaatcaccctggaaacaatcatggctgaacgtggtagcccatgcctgtaatcccagcactttgggaggcccaggaggtggatcacctgaggtcgggagttcgagaccagcgaggccaacatggtgaaacctcgactctactaaaaatacaaagttcactgggcattgtggtgtgtacctgtaatctcaactactcaggaggctgaggcaggagaatcacttaaacctgggagacagagattgcagagagccaagatcgcaccattacactccagcctgggcaagaagagtgaaactacatctaaaaaaaaaaaaaaaaaaaggaaaaggaaaagaaaaaaaaaatcatgaggcaacattgcatttaacaatattttatttatcaaaagacacttgtctttctcaggtaagtgaaggtctagagatgaaacgagtcccgatgtaaattgccccatgggcattgctgagatcacaagatcatcactgcagcatgcagcacaatagtaaatttctcaggatggaagttcaacaatccaaaaggtagtattttttttcatgatgctcagtccatcatacgaaataaaaataaattccttttcatgatcatccattcagtagaaaaaatgatagtaaatttgttctcatgaagatttttaccgtaacatataggatttatcgttattattattattctttgttttttgtttttttgaagcggagtctcactctgttacccagtctggagtgcagtcgtgcgatctgggcacactattaacctccacctccagggttcaagcatttctcctgcctcagcttcccgagtagctgggattacaggcatgcgccaccacacccggctaattttcgtatttttactagagatggggtttcaccgcattggtcgagctggatttgagctccggacctcgggtcatccgcccatctcagcctcccaaagtgctgggattacaggcgtgagccaccgcgcccggcctcaatttatcattattcacgcatccacaaactgggttcttatattttgtacgtgattttttccattgaggagagatatctgtgcatattcatgctgctcatatttcatccacaaactcggttcatatttcatccacaaacataattttttccgttgagaagagatacttgtacatatttatgctgttcaaattcacatttcatcattcttttacaagaaatagataatgtattttaaggttttccagtggtattacagatattttactgggtgtatagatagaaattaaaccaaacttctttgttctggccgccagtcatgcatcctgttttcaacatagttcacatacaactggttgtgtaaaaatgaaattattttgtttagtacaatcatcaacagttggttgattagatttttaattatcaagttaatcattgtcattatgcttctcatcgcactcgtcattaattgctgtgggaggaaatttgttatgttccctatgagagggtgtatcacaaattcaaataagaattcaacgacaatggactgtataaaggaaataagcaagtccatggaaaacatatttttttccggaaaggattaaaatatttttaaaaaggaattaaaaaaaaattgggcacggtggcaaatgcctagagtcccagctgctcaggagatggagacagaaggattgcttgagcccaggaataagttggaggctgtagtgaacagtgattccaccactgtactccagccagggcaatagagggaaaccctctttctaaaaagacaaaaagaaacaaaacaaaacaaaaaaacaccacatcaaaaaacccaacaacaaaatgaaaaaccaaataacagcaatacaattggagctattcgatccaaagaagtaaatgaaacataaagcaaataaaagagaaaagctaatacctgtgtcctgcaggactcagtccaagttctgctctgactccctcctggtgagccaccccttaaaaagtcacttggggcggggttactttgacagacagtcttctgtcaaagagggaggcggtaaatagcacttttttttttttaatttaacgcctttccaacaaattagcggctatgttgtctaagagtgcaaatgtcagaggtgggtacaggcagcaagaccctccccacaggggcagcagaaggaggaatgactaagggaacaagactttagtgtgctcaactacacaggacaggaaacagatgctttttacaaaagctggtggacttgaaggcagaatattttcaagttcctgtaactgcgaactatgacctgtagcctgtgagagtgactttctgtggcaaaggagcttttgtgaatgtgaggaagttaattatcttaacagtgggaggttctcccggcttatctagctagaccctcgtgaaatcccaagtgtccttaggaaggggaagcagagagagatttgagtccagaagaggaagaaggtgatgtgaggcccagtaggggaacaaagggcgatggcatgtaaacacttagcccccagaagtgggagagggctggggttcatcacaccagaatccctaacaatcagccttattttaattacccttgaaatggaaggaggccttagagagccagaggcttggaggggcaccctctgctgcatacacagatcccaactgctgtgggctccaaataattgcaccagggaaatcacaaattatcaaaaataaaggatgtaaagcttttaaaaaatattaaaagcccaacaaataaaaaaagttctaaatctataaaattgacctcagtctgtatatttagatgagtcatgtgtatatagcgtttcacttcaaaatatatgataaatctctcattcattggcttaaaaataaacacttcaatcaagtctttatcagaaaaattgaaacgttaactcaattgccttttagttcatgtgactttacaaaacttaaaacaataaagtcagttttaaaaattattagtaaagtaaaagaaaaatatcttcacaatgtagacattttgtccacatgagacatgtgaaatattgccattactaaatatttgcaggtcaaaaactgtttccaaaacattttaaataatcatctggcctgtctgttttagagcattcaattctagctgaggtctggggacatgtgaaaggagccacggcccgactccgtgctgggaagagtcagacattttccacagctctgtcctttgctgtgggctctgcaactcctaccaattaaaattgcttacgtttttgttttatttttactaaagaggggttcctaaaagctaacattatactgagtatatgtaactaaaactactaagaaaacaatttcacaattatacaaatgtgccaagtaaatgaaaaaataaactgtattttaataaaggttataaaaagaaaaacatatagtggtgtgaggactgtctcaggtcttcactgagcaagggatcatgacattctatggcggacagctgaccttggctttctgctcctcttgattatgtctactaagtgacatacttactctttttccacctgtcttgcctctaagggtaacaggttttatgagatccctcctagtgctttgcaggtcagcctccctttgctgcattccaattttactgcctataccctccagctggcttttgatgacaaaagtcctggtcccagccattctcagattctgtcatccccgtgggcactatggagctcagcactatgggaggttccccaaaaatctcgttttctatgaggaatggccaccacctgcatctcagtgatgctagtgacccctttcctactcctgtgctcactggtcctcatgaagatcctggttggtctgtagccccctatttttcctattaaagagaaattacagtaagacccatttgtgtgcaaaatcaattttaggcttattacacttggcctgataatttgcataaaatgcagcaagaattcatcggccatataggctacttttgagttaattttcctgggtttttacctaaaaatatactattttggttagagtcttgtgaaaataaccaatgtgttcaattgttttattttaaaaggctcttactgaacactataaatatgtataagttgaatatacaaactatattgtcataaaatcacaacccaaaatgtggagaacgcagagggaaaggtaaatttgctcgcaaaaacatacttcacccaaataactggaaaaaaaaaaagactttcatgacccttctttaaccagagcagcagctttcaaacaaggtgtttgccttggaaatgccattcacaagccaaacggcccttgagagctgtctgtcaggcactgtagaatctagcagctcctcacagagttagaaatagtttcaggaaagagattccctgcttttagtaactgcactttatattcccagatagcgagattgtatgtaaaccatttttatcttattctggaactcttttgggtactttttttttttttttttaaatgatggagtctggctctgttgctcaggctggggtgtagtggtgcgatttcagggtatgagaaaatgcagctggacctggctctttccaggaagaccctcacagccaaggagtccaaagcctggggttttcatctaattccagtgtgactggggtaggagcagctttggtgctgggtgtgtgtgtgtgtgtgtgtgtgtgtgtgtgtgtctatgcctgtgtctgtttagggtgttaggctcgtggttgtctagatacaaatgtcccagggctcaggagccccagggttatgtcaggggcaccagatgaaggtgtcaacagaagttagggcacaagggacaaaggtgagagcaaggttagattcatttaggtgcaagaaatcatagagggaggagggagaggaagccctcctgctaccaccgaggaagaagcgcagcttaaggcagaaagcctgtccggagaggaagtgagtttgagggcagggctctctgggtaaagtacggtctgggacaccagcctgggggaagggtacagaatgcagagtggcctggcgtggggactaagaacagaggagagcagctttcactgggagggtcagtgttttcagtgtccagcactgagcaaggtgagatttgggcagcttgctgtgaaataaggtcaggctctggcattgtccccattgcgtgtgtgtgtgaggggcactttgggagagtgaactctccacctccatcctctcatacgtccttcaaccgagcttgccagttaccctgattccaaggagatctatttattgttgacaatactggatcctagcagaggctgggtaggagcctgggcacaagcaagtggaggagggggcctgggcctgaaagacctgggaggtttgagagaggacacagcccacagaatggagcagatggggtagagtcggcaagcattcagggctcctagtaagttggacaatggagaccctgaaagatccagtaaaacggggagaacaaacaggtccccaactcacatccttgcagtgcctggagcttcagactccagacaggtggggaaggaaaattgagggatgtgaacatgttggagaatgtcgtgccctgaagaatgaagaaaaggggggtgaggaatgagagcaggaacggcttccagtgcctggtgcccaggagaactcagaaaatgggtgtggtggagaggaatcgaggaaccggaagtggtggaagtgtgcagggcccctccgagatcactgtgactgccaggcgtcctccctggctggagagcttcactgtcctccttcccagccaaaatgtgtcccttgaaagcttcctccccaatggactggttctgggtcctatatatttgaaggggtggcctgcctctccacacctgtgggtatttctagttgggtgggaggagagacagagaaaagaaataagacacagagacaaagtataaagaaacaacagtgggtccaggggaccagcactcagcacaccaagggcctgcaccggcaccggcctctgagtttcctcagtttttattgattattattttcattatttcagcaaaaaggaatgtagtaggagagcagggtgataataaggagaaggtcaatgaaaaacatgtgagcaaaagaatctatatcataattaagttcaagggaaagtactatgcctggacgtgcactcaggccagatttatgtttctctccacccaaacatctcagtggagtaaagaataacaaggcagtattactgcaaacatgtctcacctcccgccacagggcagcttttctcctatctcagagttgaacaaatgtacaattgggttttacaccgagacattcagttctgaggggcaagcaggagacagtggccttcctccatctcgactgcaagaggctttcctcttttactaatccacctcagcacagaccctttatgggtgttgggctgggggacagtcaggtccttctcatcccatgaggccatatttcagactatcacatggggagaaaccttggacaataccccgctttcaagggcagaggtccctgcggctttccacagtgtattgtgcccctggtttattgagactagagaatggcaatgacctttaccaagtatactgcttgtaaatattttgttaacaaggcacatcctgcacagccctaggtcccttaaaccttgatttcatacaacacatgtttttgtgagctccaagttgggtcaaagtggctgggtcaaagtggctggggcaaagctacaaattaacaacatctcagcaaagccattgttcaaagtacaggtctttttcaaaatggagtctcttatgtctttcctttctacatggacacagtgacagtctgatctctctttcctttccctacatatattcatggaccacagtcttcaaggagtccatttcctcactgtttttggtttgatttctctgaaattaggaaatgccccattgaggcacccaggattgtctttacttcccccagagcttccactcctgaggcaggagcttctcaaacaccccccaagactcaacacctaatttcaccctctgaaaccttcccatttcttaaatccaggcagggtcatggtccttagcccctcagatgctgtggagaccttctttccctttcatacattctctcaagattaaaagccacccctcctcagcacacaccccagagactcaccccaacatgcattgcaaatcaccctggaaacagtcataagaccacactcatttaataatattttatttatcaaaagacactctttctcaggtaagtgaagttctggagaggaaaagaggagtcctgatgtaaattgccctgcaggccttgctgagatcacaaggagattgttactgcagcttgtagcacaatagtaaatttcttctctggatggaagttcaacaatccagatcgtagtatattccttttcattatgctcagtccagcaaatgtgatgataacaaattccttttcatgatcatccattcagcagagaaaatgtttgtaaatgtgttttcatgaagatgtttaccataacatacaggatttaccattatcaatgcatccacaaactctgctgttgttttttatacataattttttccatcgagaagtgatagttgtacatattcatgctgttcatatttcaaccacaaactctgctggtttttttatacgtaattttttccattgagaagtgatacttgtacatatttgtgctgttcatatttcatgtttcatcatccttttacaataaataggttatattgtattttaagtttttctaactgtagtgcagaaattgtactgggtgtatacatagatatcaaaccaaatttacttgttctggctgataatgcatcatttatttcatagattatgtatttctttgacacatttcacgtacaactaattgcataaaaatgaattttcttttagtatagacatcagcatgtgcttaattcggaatttaattgttgagttaaacatcgtcattgccttttccgttgttattaattgctctggtgggaattttgttatctcatacataagacagtgtgccacaatatctcttaaaatttcaatggcaataaactttatatttaaaaacagggaatctatggaaaacacatttttttctaaaggattaaaatatttttttaaaataattttctaaaaagttaggcacggtagcaaacgtctagagtcccagctactcaggaggctgagacaggaggattgcttaagcctacgagttgggggctgcagtgaactgtgattgcaccactacattccagccagggcaatagaagttaaccctttttctaaaaaaaaaaaaaaaagaaagaaagaaagaaaaaaagcaacaacaccaaaacctcaccaacaaaatggtaaagaaaaaaaaaacagcaatacaatgtaagctatttgatccaaagaagtcaatgaaatttaaaacaaatgaaagggaaaaagtaatacttgagtcctgcaggactcagtccaagttctgctgtgcctccctcacggtgagccacccctttagaagtcacttgggtcataagttaacccgataggaagtgtcctggccaatgaactagggaggtggtaaatggcaccattttaaatttaaattcacggccttttcaacggatcagtagccatgttgggtaagagtgcaaatgtcagaggtgaaaagaggcagcaggaccctcccctagtgcttgggcaacagaaggtggaatcactaaggggacaagactttagcatgctcaagtacacaggacagaaaacatgctttttacaaaagctggtaaatatgaagagggaacattttcaagttcctgtaaccaagaactaccgcctgtaaccggtgaaagtgactttctatggcaaaagcgtttttgaaaaggtgaggaagttaaatatcttaatgttgggaggttcttctggtttatctggctagaccctaatggaatcccaagtgtccttatggagcggggagcagagagagagatttgagtccagacgaggaagaaggtgatgtgagtctgggtgcgggacagggggagaatgatgctatgtggggatctgggctggggaatgacttagctgcatgagcggagtgacttagactcctgaactagaagaaatctagggctcatcacctcagcagccctaaccatcaaccttatttttattacaggtcttccatcgacggactccctaaaaagccagcggcgtggaggggcgccctctattggacaaatagatcttgactactttcggccctcaaatagcctgactaggcaaataacaaataataataatttttttttaaatcatggaaaatattttaaaaaacaattaaaaagttataaatctataaaatctgcttctgtctgtgtgtctgtatatttagatgtctcatgtgtacataatgtttcactaccaaaatatatgatgaaaccctcattaatcggcttagaaaactaaacacctaaatattttctcagaaaatacaaaaactttaactcaaatcccttttaattcacctgactttaaaaatctttaaaaaataaagcatgctttaaaattattagtaaagtaaaattagaacatcttcagaatttagacatttggtttaaattatacaggtcaaatactgcccttagtaaatattttcaggtcataaacaactcctgtaatcttttaaataattgaattacatgtctgttttagagctttaagttctagctaaagcctggggacaaatgaagggcaccatgccccctctctgtgctggaaagagacattttctacagctctgacccttgcagtaggctttgcaactgctacctatcaaaattgcctacatcctaagtttattattaaaaggagttgcttggagttaacattataatgaatatatgtaactaaaactatttctcatacaaagtatatgaaaaagtagaatgtatttttaataaaaagttataaaaagacatgaacatgtagtttttataaaaaacagtaattttgtctagttttgcagttctaaaaagttatgttaaattcaaaaataaaaaataacaagacaagactcaaggtttaaataagttgtaaaagatttgtaaaaattagttctataaaaattttacaaaaaaaagcattggttaaaatttaaggaattattttgtttttacagaaattaaacattcattaaaaacactctgatacaaggccttaatttgggttcatgtatcagaatagcagggttttcttagaatattaatctattctttaaaagaactatgaatgttatgcaaactttataaaaatcttaccttagagtcaaactgattaaaattccatagattttacgtaaaattttattaaaaattaacttcaacaaaaataaaatttgattttctcctttaaacaaaagttttgcgtaatattaaataataaagcatttttgtttaccttttaaactataaacacacacacacatacacatacaccaacactaaagtcagctgacctcatactgtctttattggatattcttgtttaaaaaactatcttctttggaaaataaagttttttattttaaaccatattttaaattatcattttgactaaatccataacatacagtgatctgtaataattctattttataatatcaagtgttttgaagaactccaggaacagccatgagagaacactgtggtttagtaacactttatttcctcagtttgaaaatagttgtctttcttggggaggccggtttcagcagatgaaaacaagagtcatgatgaaaattacccagcagtggttagtgtgaccataggaacattgtcatcaggtcagcagaaaacatatcagcaaatttttctcatactggcagtgtgtaggggtggatgtttacagttcctgaagccccagtggtcgtgtggtcttttagttttgccatttataggcaacttgtggtaactagctcaattagacacattccttatcacaaggacagagggctttctgtatcctagggttcttgccttggcattccagaagaatcaggtcacacgtggacgtggagaatgagtgcaaggttttattgagtggaagtagctctcagcagatgggggagccagaaaggagattggtttctccctggattggggccgttcagcagccctggctctcctctgactgccccaggcaaaatccacatcgttctataagtcggtgccctgctggtgtgctggtgcctgttgtcatgttcctcttcatgtccagccgcctgtgtgttcctccgctgatgtgctcctctcgacgtcaagcctcctgtgtgtctgactgctagggtcttggggtttttataagcacaggatgggtcttagcaggccaggatgatcttgggaaagacaacattcggtcaggaaaacaaaaatgcctgttgtcatctaggtccgtggggacaagcccaggtgtggagcttttagccagggaccacagcctcctgtatccaacacttcccttcaccttttctatatcattcaaagggatcatgcccttcccatcccagcacttcactttcatgtcatttgccccctctgaagaggtacatctaactgccattagaatatggatgatgaccagtcttagctgcttcctgctgaaagggggcattgttttgggggaaaacggcagtcagattcctcccaggggtctctataataaaagatcgaggtggctactttcaggaggtcctctaatgtactatctggtcccaagtcccatttctgcaacctcctcctgatgtcaggagctgcctgagtaataattttatcctttaggattatctgtccctcgattgaattaggagatagagaggtgtgatttaccaaggcctctcttagcctctccaggaaggcagtgggattttcatcaaatccctggttaattatggacaacttagtataattgagaggcttggtcttagacctacgtaagccctctattatgcacacctgaaagtgtctcctcttccagtcttccatctcattattgggatcccatttagggtccttcactggtgctacttctcttccagttggataatattcgctcccttccctgatgctataggtgatgcaaagctcatccccaaatctctctgctgctggcagagcagcctgcttctcagtgtctatcaggttctgactcaaaagtaacataacgtctctccaggagagttcaaatgttagggtgaaattctggaaagcttctatatatctatcagggtcatctgaacacttgcccagatctcccttaatttgctttaagtcttgtagggaaaagaggacttggaccttactgggcccaaattcactgggcatctgtaggaggggcaagagtgagactgggcttgtttgggatgaagatttctaggaggggccaggtgagaggctgaagctggatacggaggttggggtggacccagaggagcagggcttgagggagctggcacgtcagctgggggtgcgtctgggactcgtgtctttaattccctgggcttgaccctggcagccttccccgagacagcaaacaggagggctggaacaatcctacatgtcagcaaaggtctggattgctttgcaaggtatagaaagcctgcacatttggggcctcagaccatgtgtcctcacatccagagaaaagttctaattgcaggatggtattgaaatgaatggtcccttcctgaagccaagccagtccttcctgtaaaccataatttggccaaacctatgtgcggagggctatgagatgcttttcctctggattctgagggtcaaaacagtcccaatggttcaggatacactcaaggggagtacaagctgggggtggtgaggagaactggctgcccattctgaaagacagggaatagaggtgttcctcatttcccttccttcttttggcaaaaagctcagggtgtgatggggagggaaagcaagcatcttcacttcactttccacctcttacccctgcgccctggcaaccttggcaggtgccggccacaggtacaaatgcggtatgtacccatgaagcagggagaacctggagattaggaattaactgccctcacctatgtttccttttctccctgctgttgaaaaactttgagttccctgggcctttttatcccatgaggcatggcctccttctgtgggatggggttcagtcagcaggaattggtcctgtccatttacattgtgcctgttgcctggctttgaattcctcagacctgctttctctttctagggcctcagcctgaagcttggaattgagtttgggactgaaaaagcatttcagaggctgtttatatccatttagtgcctcaaataagccctgctgaatttgcaattatcagccagcaggggtcactcctctgttaacttccctattagaaacagagcggtggggattctcacttagaaaagaaaaaaagagaaaaacagttaaagaggcaaaaagtggggaatgctgggggaagaaccccttgcttagtgcaagtgggcccctctaatccttataactttcccatccttcccccagttcagaccaggttgaattccttggccatggaaggaaaggttccattgatgcagtgggtgagaagcactctgtagggtcctggctaccatcggttttctcacacccccctcatcccaggcagtggagggagacacttctgcgacattgctccccctgccccttcatggctattgggtgtggcctttgcctgctgcaggcatgcctaggtgctggagctgggagggaaaagggtaaggagaggtgccctggaagccgctcatgcctggggctgtcaaggtggaggcatacatggcacctctaggaaaaattggtctgatttgcacctttggcggctgagccaaatgctcattttacttagtaacattgcctcagcctgtagcaaaactcttaacattataaaggaagagataagatccatttcaaataatgtgtgagagagaaaagagatgaaaggaaaacagagtcttttacctgcaggaaagggagagaagtggcagagttttggaagaaaggcaggcccaacagtttcccattcactcacactcaccttccgagatcccagacgagccaccagttgaaatgggaaaagtttccttgtccccctcacaggaggtggagtgggggtgtggcttgcttctttagtactccgctgctcaaacctctagggaagcatacagactggcaagttgtggggctacaaccccatggcagcatctaggggtagatgtttacagctgctgaagccccagtggacatgtggtaccatgtgctcttttagttttgccatctataggtggctttgtggtaaccagctcaattagacccattccttaacccaaagacagagggctttctgtatcccgcggttgttacctaggtgtaccagaaaaatcaaatcacacgtggtcttggagaatgagtgcaaggttttattgagtggaagtagctctcagcagatgggggagccaaaagggagaatagttttcccctgaagtcgggttattcagcggcccaggctctcctctggctgccccagccaaactctatgtcaatccattggtcggtggcctgccagagtgctggtgcctgttggtggattcctctcagcgtcgagagtttttccctctcaggaaagggagagaagtggcagccacccatgtgttcttgcactgatgtgctcctctcgacgtccaacctcctgtgtgtctgcctgctagggtcccagagtttttttaggcacaggatagggcatggtgggccagggtgatcttgggaaatgcaacatttggtcaggaaaacaaaaatgcctgtcctcatctaggtccaggggcacaagcccaggtttggagccctagccagggaccccggcctcctctacccatcactttccttcaccttttctgtatcattcaaagggaccatgcccttcccttcccagcacttctcttctgtatcaataggtgatgtttttaaaatttcccaactctagtgcaggcatggtactagacatatacatagaaataaaaccacacttattcttctggctggcaagacatagtatttttgccaaattatgtgttgttttgaagcattttatgtacccctggtcatataaaaataaagctattttgttcagtacaaacagcagcattttctggattagaaagttaatcatcttaaaagatcatcacggatttttccattgcactcatcactaattgctttggcaaaaaatttcttatctcacgcatgacaaaatcagccgcagtatctcctagtaatttaatggtgatgatctttataaaggaaataagcacatcaagggaaaacataattttttttaaaaaaagagtaataaaactttttaaaagtcttttttaaaagactgcttttctaaaatagtaaaataaaactccaccaataaaaccaccaacaaaacagaaaagaaaaaataatgatatgatcggagctatttgatgaaagatggtaaattaaatttaaaatgattagaagagaaaaagcaatacctgtctcccgtaggtctcagtccaggttctgctatgcctttctcctggtgagccacctatttaagagtcgcttaaagcatatgttaatccaacaacagcagattaaaaaccaatgcaatctgaactatttgatctaaaaacataaataaaatttaaaacaaataaaagagaaaaagcagtacctgtgtcctgtaggtctcagtccaagatctgctctgactcccttgtggtgagttagccctttagaagtcacttggggtggggcatatgttaattccactaacattggttctggccaatgagtcaggaaggtggtaaatggcaccttttcttcttgctgatttctttcagttcctttggagtctggacattagtcctttgtcagatgcctagtttgtgactactgtttcctatactgtgggttgtgtgtttaccctgctgatatttcttctgccttgcagaagattttcggtttcattaggtcctattgatcttattctatttttatatttttgcgtttgcttttggggcattagtcatgactacttggcctaagccaatgtctagaaaagctttttggatgctatcttgtagcatttttagactttcaggtcttagatggaagtttttatatgctttgttaaagatcaggtgactgaaagtaccgggctttgtttctcggttctctattctgttccattgctctatgtgcctatttttatacttcctgcaccatttattgaataaagtgtcctttccccaattagtgtttttgcatactttgttgaagattagttgtctgtaagcatttggctttatttctgggttctctattctgttccattgctctatgtgcctatttttatacttcctgcaccatttattgaataaagtatcctttccccaattaatgtttttgtgtactttgttgaagattagttgtctgtaagcatttggctttatttctgggttctctattctgttctattgctctatgtgcatattttataccagtatcatgctattttggtgattgtagccttgtagtataatttaaagcctgccttcagatttgttctttttgcaaagtattgctttggatatgcggtcacgtttttggttttgtataaattttaggattcttttttctagttctgggaaggagaatgatgatattttgatgagaattctactgctctgtagatggctttggagagtatggtcactttcacaatattgattctacctattcataagcttataatgtgttcccatttgtttgtgtcaactgtgatttctttcagcactattttgtagttttccttgtaggaaacttacattaacctacttggttaagtatatttctaagtattttacttattaaaaattctcagggaaatgcaaagtaaaactgaggtgggaaattaaagaaaaataaaattaaaaagaaagggaaataagctttcttgtattaagctaacttgtcccagaggcagcaacaggcacagcccagacccaggaaaagtcttgataatattatttattgtattctggagactcttccagcactccttcaatgtagggagaagaaaaacaaattttcctttgttttatggtatgagtttatagattcttgttctctttaactagtaacttcaagtattctgttttatctaagaagtatggcaaaggtcatgagaagcctgagcaggcctgaactacagctctctaggcaccatagtgaagataaaccaatgcaagcctctttagagcaaaacctagataatagacatctgggttgcatagcaacagttatgtgcaatcctgagttatgaacctgttacaatttgattaactgtctttttcctgcctctgtatccctgctttcacaccactgtaagcttgcttcaagctggcccacccccttttgtgaagtgtgtataaaagtcaagtgctgtctttgttccaggccctgtctttggacgtgagtctgctgggcctgagagcactcaataaaagattctcctgttttaacccaaagcctctctctcatcctcctaaatcccacaacaaaaccacaatgagatgctatcttaatcttgctagaagcccataatttaaaagtcagaaaacaatagatgttggcatagatgtggtcaaaagggagcactttgacactgctagtgggaatttaaactagtccgaccactatggtaaacagtatggggattccttaaagaactaaaagtagaccattcattccagcaatcccattactggctatctacccaaaggaaaagaagttattccataaaaaagacacaagaatatggatgtttatagcagccgattcgcaattgcagtgatatgggaccaacttaagtgcccatcaacgaacgagtggataaagcaaatgtggtacaccatggaataatacttgataataaaaaggaacaaaataatgtcctttgcaacaagttggatggaactggaagccattattctaagtgaagtaactgaggaatggcaaatcaaatattgaatgttttcacttttaaatgagagttaagctatgagaatgcaaaggcataagaatgatataatggacttggggactcagggggaaaggttgggagggggatgaggaataaatgatgacatattgggtatattatacactgctcaggagacagatgcctcaaaatctcagaaattaccactaaggaacttttatccacataaccaaaaaccacatatattccacacactattgaaagaaacataaacattattttaaaaaataaagccacttttaaaattagcaaaataaaataaatatgtcttcagagtttagatattggatccaaattagacagatcaaatactgcctttactaaatattttcatgtcattaacaacttctaaaacctttcaaacagttttttgacatgtcttggaaccatccatttctagctaaggcctgggcacctgtgaaatagggccatgcccccccttatactgggaagagtaagatatttcaagactaagatgttttctacagctccatctttttctttaagctctacatcaaggacataattaaaattggttgtctcctaagtggtttactaaaaatgcatacttaagagttaccattataattaatatttgtatctaaagctacttaaaaattttcacacacaaatctgactgaacaagtaaaatatattttaagtcaaagtttataaaaggacatgagaacatagcttttatgaaaaaattagttttgtcaagtttagaggttttcaaatattttaaattcaggaaataaaataacaaaaagacaaaagaaaatggttgaacaacttagaaaaggtttgttaaaattcatcttataaaacaatctacatgtaaaaagtgggctaaaatttgaaagagattatttaggttttccataaattaatccagaaggggtaggaagtcttaagaatgaggaaggacaggaggaaggggaggtcatcctgacactgcagaggcagaagtgcagctgaaggtatgaaggctaagaggggaggggagtttgagtgctgctgcctggctgtcagagcagaggagggtcctgggcaccagacttgaggaagggatgaaaatgctgggcagacctgtagtgggcccttgagatggcagatagtggtttccagagagagggccattgttttccagtgcccagcactgagcagagagagttttgggcagtgtaaaaaaaaaaagagaacttacctctttctcgttttagaaaaagaacagtctaagaatatcagcagggaaactctcagtgcttcaaggggttaaacgcccttttggctttcttgtgttggtttcatcatagaggaggagaaacttcttggaagtgttcctaaaaacacaacacgtctgcttctcctttcaaaaaaggaagtgctaaaacacgaacactctagatccaaatattaatacggatgtctaaatgcttccgttttccaaggggcagaaagctaaaggttgtaacctattcatttcagtcaaagttggtgaaagggaagcaaaggaactgggtggggcttggaaggatgacgaagctcaagctcattggccagcaacctctctcctgggggcgggaggggtgagcatacgtcattgctttggcttctataaaatgaggaggactcaccgagtgtgaagagtccttctggtgattgcagctgagagcacactcacgacgttctgcaaggattctctgattatgattctgaagggaaaagcgatggaatggacagcagagattgtaattttctttatcttgaattacggaagaaagtatctaggacagaaatccacgacaagtccttggaaccagcagatctcttcgttcacggagacgttgacgtattctctattgaagaagattcttaccttcttactggacaaggttttgtcagttctgcgtgactggattgtccgggagactctgaggaaactgatgtcacatgtttttccaaagaagatgtttctggaaccaacaactgtgattgtggtttgaggacttctgagagttccagtacaggaaataagcagaacatcagctggaggctaaacggatccagacttcactcttcacttcccttcctattcagtctattgtgcctgctgactgagaagcttggctggtatgtgagcaaataaacggaactattcagaaggagatgttgacatattctgtattgaagaagatccttatcttctcacctgacaaggttttgtcagttctgtgtgactggattgtccggaagactctgaggaaactgatgtcacatgtttttccaaagaagatgtttctggaaccaacaactgtgattgtggtttgaggacgcctgggagttccggtatgcgaaataagcagaacatcagctggcggctgaagggatgcagcctccactcttcacttcccttgccattccatctattgtgtctgcctgactgagaagcttggctggtatgtgaggaaataaacggaattataaacaaggagattgtttctcatctacttcattctgttgtggcttttctattttggggttcagggtgtgtgacaaggaccaaggagatgaaaggtttcatgatggagaaagcccaggcaatcagattgaagagctatccacagggaatcttggctgctgaggggctgcaccctgcaacggactgaccatatgacagaaaagggttttaaaggctcaacttctggactgagaacccagagtaatttgggaacctcctctgtgaggagatatgaaagctgggaatcatgacatccctaggaatggaaggcacatttcctgatggaaggggtgctttggaaaacaggagcagagtagacacagcagccttgtggatacgggtgggcagcatgcatgggtgatgtgaacgtggagtgtttgtgatcgaaactcaaaatgtctgacaaagtgaaaacctagaaaccacaatgaggaggaagagtttgtgagggcaatcactctccccatgtgtgaaaatcgggggctcttaaaatctcatctggagaggtgcagtctaccaaactctgggactttagcctccccttttaaaaaaccgtgcatcaataccaacgtccgaaaccacagaaataacacctggcttgcatggagacaaggacaaaaagccgtcatgatgagttgttctgctcacttgctgcctctgttcagtgcacaggatattgtccacccactagcaggctactgcaagagaagtgtgcaatatgttccctatgtgccatatatgtgccatatggcccatatgacaactgagtcagaaaatatctgatgccctcagagttacactccacctggagcttgcccccagccatccaggacctaggctccctaccctgtccaattttctggtgttttgggggcttcattctctaaggtgtgcccactctttactcaaaccaaaacacccacatattcctgcccatgaacaaccaatcaaccacttctcagttccacatcctgctgttgggtctctagtggtgacactgtaactcccaggtcatagtggtgacactataacacctagctaaattgatgccttgtctctaggaggccatgggctcctgcaggtctcatctgactctctgtagccttccctgacaatgctcacaatacccaagccagagccacattgacagcaagctgctctcatcttacctttgccagacctggccactggaaaaggctgaccctcatcctgcaatgcctatacctccaacctttgtctcaagctggtgtcctggagggacttctaagcagaaaacagattcagactcccatcctctcctgaatggcctcatatccaattctcagaccctcagccttcattgtaaggacacttcatccatgcccttgagtattctgtctgcactgtgtattctgcaatagattctcctccctctgcgaccctcaactccttccgcagactttttgttttcttgatcatctaccatagtcttccactgggacactgccaagcccattctggagagtgagttgtgcaagtacactgccccccatctacctttcgggaggtgtatacacccttctttctcccaggtctggaggctttctattttcatcctgaggcatctccacctgctcttggattcttcaaattgacaaccaccagttaacaagaactatgtgtcaccaaatagccaaacaatggcaattacaaaaataaaattaatagctgtaacccccattagcaaggatacacaaatcaaatcagggatagtgggtgaggaagtctgcctaacattcaaggaaggattctgaagtgatacaaaatcattgcctttgctatctttagaatggacactttcagccaggcacagttgctcagcctgtaatcccagcactctgagagccccagttgggtggatcacttgaggccagcagcttgagaccaccctgggcaatgtgcagaaaccccaactctactaaaaatacaaaaatagccagttattgtggcacatgcctgtaatcccaactccttgggaggctgaggcacaagaatcacttgaatctgggagccagagtttgtaatgagcgaagatcatgccactgcactctagcctaggcattagagtgataatctgtctgtggaaaataaaaacattcctcttcaaagttttcttctttaaatcataaatgttggaattaatatatcctctttgaaactcactttcttcaagcttctttatttgatggtagtaaatctttgttaagctttatgaggcaagagtaatggaagaagcatattatatatatttatactctaacctcagtgcttgttctagcaagctcaggcatgcgtgaatgtgcccaggcatgttccagcccataccttatatcctttccttattgggaaatgctgttactcctataagcattcttgtaagcaacttcctctttttctttgtctccactatctttacctattgaggacagttttaggttcttagccagttggatgtagcatagactgtgaggtccaaccccagccaatggagatagcacacagcagtagcgacctcatgcttaacagataaatattcctgtctccctttgtttggggtgctctcagctgatgagcaacaccctttctaaagaaattaaagttgtcttgctgagaaaacttttggtctaaatgctgattcttccttgcagcactgaagaagaagcaattatttccaacactttctcatacacaaaaaaagaagaaggtggaagaaaactttcttgtgcaccctatccctcactcagaaagacaacagaaggctcctagtggcaagccctagaggattcatttcttttgggaaccctcttggctgggatactaggactcaggtcaaactcagcattttcagtgtgtgggaagtgtgcttgggtttcactgttacttccaataatgtgatttggtccttggggttcaccaaattttggtatggagtggtgaaccctgttaagtttaagtgtctataaaattaacaaagcaaaataaccattctgccccatggttcagagaccaaatattgtgtaggaaatgctttagcgagagaaacagagaagaataaaaaatgtcctcaagcgctgcattatttcttgttatcgtccagatcttagaggaaaggctttcattttccctcattcagtatgatattagctgtgcatctgtcatttatggcttttattatgttggggtatgttccctgtgtatgtagttttttcagggtttttgttatgaagtgatgttgaactttatcaaacgtttttcagtttcagttgaaacgatcatatgctttttgtccttcattctcttgatatgatgcatcatgttgatgatttccatatggtgcactgtccttgcatcctgggcatgaattccacttgatcatgacaaatgaatttttaatgcattcttgaattccgtttgctggtattttgttgaggatttttgcatcaatattcatcagagatattggcctgcagtttctttttttttcttttttctttgttttgttgtttgtttgtttgtttgttttgatgtgtctatgtctggttttggtatctgggtagtagtgttccatccccttttattttttagaataatttgaataagactggtgttggttctttaaatatttggtagaattccgaagtgaagtcattgggccccgggcttttctttagtggaaggctgtttattatggcttcaatctcgttacttattattggtctattcatgttttgaatttgttccttatttaatcttggtaggctgtgtgtatctaggaatttgtccatttcttttagattttcaaatttattggcacataattgcccattgtagcctctaatcgtcatttgagttcctgcagtaccaattataatgtctccttcttcatttttgattgtatttatttggatcctgcccctttttttcttacttaggctgcctaataatttcttaattttgttgaactttttcttttgtttgtctcgctctgccaccaggctggagtgtagtggtgtgatcttggctcactggaacctccgtctcccaggttcaagcaattctcctgcctcaccctcccaaatagctgggactacaggcaagtgccaccactcccagctaatttttgtatttttagtagacacgggttttcaccatgttggccaggatggtctcgatctcttgacttcataatccacctgcctcagcctcccaaagtgctgggattacaggcatgagccactgcgcccagcctaattttgtttaaattttcaagaaatcaacttcttctttcattgatttctgtattttttatttccattttatttatttaaactctaagctttattctatcttcttctcattttagctttggtatgcttattgcctctctagctctttaatgtgcattgttagattgtttatttgaagttcttcctctctacaccataagacgtaagcatgtcctcattatgtcataagatgtaaccacttacagctataaacttccttcttagttctgcttttgctgtatctcataggctttgttatgttgtgtttccattatcaattgtgtcagaaatttttcaatatttttcttaatttcttcattgagcaactgatcatttgggagcatatttttaaacttccatgtacttacatagtttccaaaatacctcttgtgatcaatttctagttttattccactatggttcaagaagatgcttgatattatttcaattttttttcacattttaagatgtgttttgtgacctaacatatggtctactttttttttttattaaactttaagttgtggggtacatgtgtagaccgtgcagttttgttacataggtatacacgtgccatggtggtttgctgctcccattaacctgtcatctacattaggtacttctcataatgctatccctcccctaacctccaccctctgacaggacctggtgtgtgatgttcccctccctgtgtccatgtgatctatttttgagaatgatccatgtggattagaatgctgtggaaaagactttggattcctaatatccagggagggagacgatgatattactttcaatatcacacgggtgtacacactctctgtgacattgttcctaatatccagtggaagagaggatgatataacacccagggagggagaggatgatattactcttaatattgcagggtgtgtacccatgcctatgatattgttcctaatatcaggagggggagaggatgatattactcagaatatggcagggggtgtacacacactctgtgacatggttcttaatatacaggggagaatgggacaatattactctcaatatcgcagggggcgtacaaccctgtgatttgttcctaatatacaaaaggggacagtatgatattgttcctaaaatcgcagaaggtgtacaacgccctgtgatattgttcctaatatccagggcgggagaggatgatattacccccaatatcacagggggtgtgcactttccctgttacattgttcctatgatccgagtggggggaaatgacattagtcccaatatcgcaggatgtgtacactactcccccatgatattgttcctaatatcaagggggagagaggaggatattactcccaatatcgcaagggaggtacatcctccatgcaatattgttcgtaatattcaggaggagagaggaagatattactctcaatatcgcagaaagtggacacccaccctgtgatgttcttcataatatccagggaagcagacgattatatgactttcaatatcgctgggagtgtacatcccttttgggatattgtttctaatatccaggaagggagaggattatattacttccagtattgcagccagtgtacacatttcttgtgatattgttcctaatatccagaaagggaaaggatgatattactcccaatattgcaggtggtgtacacccccctctgatattgttccttacatcaaggaaaagaaagaagaatattactcccaatatcgaagagagtgtacacccctcctgtgatattgtatttaatatccatggggaaagaggatgttgttactcccaatatcgcagggggtttacacccacactgtgatattgttcctaaaatccagtgaaggagaaaataatattgctcccaatattgcagggtgtatacaggccctcccccgttatattgctcctaatatccagcggtggagaggatattactttcaatttttgcagggagtgtgtaccccctctctgatatttttctaatatcaaggatgggaaaggatgccattactcccaatatcgcaggaggtgtacatgccctgtgatattgttcctaatatccagggaggtagaggatgatattactttcaatattgcaggggctgtacaccctctatgatgttgttattaatatttaggttgggagaaaatgatatttttcctaatatcctgggaaggaaaggatgatattactgtaaatattccagggagtgtacaccttcctaatattctaatattgttcctaatatccaggggtgggagaggattatattactcccaatatcgcagtgggtgtacacccctcctgtgatgttgtttctaatatccaagcgaggagaaaatgatatcactctcaataccgcagggggtgtacaccttccccatcatatcgttcctaatattcagagggaaagaagatgatgttactttcaatatcgcaggggttgtacacaacccctgtgatatttctcctaatatccaggaagaaagaggatgatattgctcccattatagcagacggtatacgcctccctgtaacattgtttctaatatcaagactgggagaggatgatatcacttccagtatcgcaaggggtgtacacctcccccgtgatattgttactaatatccagggggaagaggataatattactttcaatattgcaggggctgtacacccccgtgatattgttgttaatatttaggttgggagaaaatgatattagtccaaatatcgcagagagtgtacacacttccgataatattgttcttaatatccatgggggagacgatgatattacacccaatatcgcagggggtgtagtctccccttgtgatattgtccctaatattcagggaagtaaacgatgatgttagtgtgaatattccagggagtgtacaccccctttgtgatattgtcctaatatccgcaggagagaagataatattactcccaatatcgcagggggtgaacacaccccctgtgatattgtttctaatatccaagcgaggagaaaataatattactcccaatgtctcaggggatatacaccttccctatgatattgtttctaatattcaggtggaaaacgggtgatattactcctaatatccaggaagaaaggggattatgttactccccttatagcagggggtatacacctcccctgtaatattgttcctaatatcaaggctgggatatacgtggggggaaggatgatattactcccaatatcacaggggttataaaaccttctgtgatattgctcctaataaccatggcggaagaagatgatattactcctaatattgcaggaggtgtacactcccccattatgttgttcctagtatgcagaaaaggagaggatgacattattgccaatatcgcagggtgtgtacaccacccatgatattgttcctaatatttagagggacagaggatgatattactcccaatatcgcagggggtgtacacgcatcccctgtgatattgttcttgaaatcgaggggaaagagaattatatttctctaaatattgcagagggtgtacaccgccccctgtgatattgttcctaatagccgggggcggggggagataattaaattactttcaatatctcagagagtgtacatcccccttgtgacattgttcctaatatccagagcaaaagagaatgatattcctcccagtatcgcaggaagtgtacatttaacctgtaatattgtttctaatatccagggggaagagaatagtaatactcccaatatcgtaggggttgtacaccttttctgtgatattgttgcaaatatttagaagagagagagaatattactcgcaatatcacagggaatgtatacttcccctgtgatattgttctaatatctagaaaaagagaggataatattactcctaatattgcagggggtgtacacccccacttgtgatattgttcctaatataaaggaaggtcgaaaaacaaacggggagcccagggggaaggaaggcaggcgaggaagaggcagcgccggggcgccggagggagcagccgggccgcggaagcgcgagcacgagaccggtcgcggtcgcagtcgcatttttgccgttgtcgcggccgccgccgccgaggcttacccggggatgtctgagcccgcgcctcgcggcccccaagctccacgctgcgcccgctgtcccggcctctaagggccgccacgtccctgcggcgcgcgcaggcagaaagcggcttcgtgccggcggagggggcccgggcgggccgggaaaggctgccccaggccccgcgcctaccccatcaccgcggccggcgccgggccgggaggatgagcggtgtggggctctgaagcatggagggggttttgtacaagtggaccaactatctcacaggttggcagcctcgttggtttgttttagataatggaatcttatcctattatgattcacaagatgatgtttgcaaagggagcaaaggaagcataaagatggcagtttgtgaaattaaaggtgacagctttggaggggaccacccttgattggatacataaattctgttcattcagcagacaacacaagaatggaattaatcattcctggagagcagcatttctacatgaaggcagtgaacgcagctgaaagacagaggtggctggtcgctctggggagctccaaagcatgtttgactgatacaaggactaaaaacgaaaaagaaagaagtgaaaccagtgaatcgctgaaaaccaaaatgtctgaacttcgcctctactgtgacctcttaatgcagcaagttcatacgatacaggaatttgttcaccacgatgagaatcattcatctcctagtgcagagaacatcaatgaagcctcttctctgcttagtgccacgtgtaacacgttcatcacaacgcttgaggaatgtgtgaagatagccaatgccaggtttaaacctgagatgtttcaacggcaccatccggatcccttagtttctcctgtgtcaccttctcctgttcaaatgaggaagcgttctgtcagccaccctggttcttgcaccagggaggagtagccactgtataaaagaaccagtatctgcacttcaccgactctcccagcgacgccgaagaacctactcagatacagattcttgtagtgatattcctcttgaagacccagatagacctgttcactgttcaaaaaatacacttaatggagatttggcatcagcaaccattcctgaagaaagcagacttatggccaaaaaacaatctgaatcagaagatactcttccatccttctcttcctgaagaaactgtagtgtccaactttctctaagtattgctatgcaaaagctgctgtaattgaactattgttatagggagtagttttttcccttaggactctgcactttatagaatattgtaaaacagacaaacaagaaaacaaaccacatacttttgaagcgtgttttatctttatatagtttgtttgcaagagtattttcctaataacttcacagtatgaatgtgcatcttttttttctttttttaacaaatgatggtgtaacattttgacatccataaggacaaatgtagatatttttctaaaaaaccgtgaggggactgacagcttggtcagggtgtattgtagcttataaacatgaaatcttacaaggtttcagtttgacagaagtgtgatatatgtaacttgtgccatggaccaaatggtcactttaccacagctaaaaatgagttatgatagcagcttgatggtgattgcattgtattcctttaatcaaaaaggaaacgcaatattctaagtatctttagcccaaataccatgacatattgagcatctttaaataaccagactgtattgtccttcatatgtgaagttgacactactgatttgtcaataccaaattttgggttaaagtgtttaatttttatttatttattttcttgttgcctcaaaagatgattgcattctaacttttgtgacctaccaaatttaagatgtgtatacattgttctttacgttgttctagaaaagagattttaatgctgtagtgacttagctcacttacatcagagaaataaacaactttcaatggaaaaaaatatatataaaggaaggaagaggatgatattacttctcatatagaaggggttgtacaccccccttgtgatattgttcctaatattcagggagggagaggattatattactcccaatatagcagggagtgtacacccccccccccgtgataatgttcctaatattcagggaagcagaggatgatattactttcaatatcacagggggtgtgctgtccccctgttatattgttcttaatattcaggggggagaggatattattatgcccgatatcacaggagaagtacaccccacaagtgatattgttcctaatatccaggggtaaagaggatgatatcgcaggtggtgtacacccctccccgtgatattgtttctaatataaagaaggagagagcatgatattactcccaatatcgctggaggtctacaccccccttgtgatactgttcctaatatccaggaagggaaacaatgatattgctgtgaatattccagggggtgtacacccctttgtaatattgttcctcatatccagggggtagagaggatgatattactcccaatatcgcagggggtgcacggccccactgtgatattgtttttcatatccaggaggggagaggatgacattactctcaatatggcagggggcgaacaccccctgtgatattgtgctagttaggttgggagaaaatgatattactcccaatatcgcagggggtgtacaccgctcctgtgatattgttcctaatatccatgacgggagaggatattactcccaatatcgcagggggtgtacctctcccctgtgggattgttcacagtatccaaaagggaagaggatgatgttactcccaatatcacagggagtgtacaccaccattgtgatattgttcctaatagccagggaagaaaacgatgatattattgtgaatattacagggggtgtacacaccccctgtgatatggtttttaatatacaggttggaaaaggatgatattactcccaatatcacaaaaggtgtacacacccccccatgatattgttcttaatacttcggtggggagaaaatgatattagtctccatatcacaggggtgtgaactcctccggtgatattgtttttaatatcaagaggggaggagatgatattgctttcaatatcgctgggggtgtacatccctcctgtgatattgttccttatatccaggcgaggggaaaataatattactcccaatagtacacaccccatgtggtattgttcctaatactcagggggaaagaagataatattactttcaatatcacagggtttgtacacctttcctgtggtatagttttcaatatccagggggaaggtacatgatattactcccattgcagcaaggggtgtacacacctcctgtgatattgttcctaatatccagaagtggtgaggatgatattactcccagggggtgtacaccccacctatgatattgtttctaatatccaggggaaaagagtgtgatattatgcccaatatcgcagagggtgtacacttatcctgggatattgtttctagtatttggggagggaggagaggatgctattattctcaatatcgcagaaattgtacacccccgctgtgatattcttcataataatcagggaaaaagaggatgatattactaccaatattgcagggggttacacttcccctttggtagtgttcctaatatccaggaagaaagaggatgatattaatcccattttccaggaagtgtacacccaccgtgtcatgttgttcctaatatccagcagggaagaggatgatattactcccaatatcggagagggtgtacacttcccctgttatattgtttctaatacccagggggaagaaggatgacattactgccaatatcacagggtgtgtaccccaccctgctattgttcctaatattcaaaaggaaagatgaaaatattactcccaatatctcagggtgtgtacacctctcctgtgatatcgttcctaatatccacaggaagagagaatattactctcaatattgcaggggggtgtacacccccctgtgatattgttccaaatattcgggcggggagaggatgatattagtcccaatatcgcagggggtgtgcaccaacctgtgatattgttcctaatatccatgcgggggaggacgatatcactctcaatgtcgcaggaagtgtacacctctcttgttatatttttcttaatatccaggagggaaaagatgatattactgccaatatcgcagggtgtgtccaccccccttttatattgttcctaatatccaatggaaaagaggatgacattgctctccatatcccagaaggtgtacaacgcccctgtaatattgttcctaatattttgggggaagagaggatgatataacttataatatcacaggaggtgtacaccacccctatgtattgttcctaatatcctttaagggagaggatgatattactcccaatatctcaggtggtgcctattccccctgtgatattgtttttaatatccaggggaagagagtatgatattacgcccaatatcgcagggggcatacaccctctctgagatattgttcataatatatagagggagagaggatgatattacttccaatatcagaggtggggtacaccccccggttatattattcttgatatccaggaggggagaggttgatattactggatatatagcagggagtgttcacatcttctgtgatactgttcctaatatccagaaaagtagaggatgatattactcccaatatcgcagaacgtgtacacctccctgtgatattgatcctaacattcaaaggggagaggatgatattactcaaaacatcacagggcatgtacactcccctgtgatattgttcctagtatccagaagggagcaagataatattactttcaatatcgcagggggtgtacacccctctttggtatgtttcctaatatccagaaggaaagagggtgctattactttccatattgcaaggggtgtacacccccctgtggtatggttcataatatccagggagggaaagggtgctattattccccatatcgcgaggcatgtacaccctgctgcggtacggttcctaatatccagggggaaagaggatgctattacttcccatatcgcggggtgtgtacacccccgtgtggtatgttttgtaatctccgggaacgaagagggtgttattacccctcatatcgctggaaatgtacactcccctgtggtacggttcacaatatccaggggattgagggtgctattactccccatatcgcggggggagtgcacctccctgtggtatggttcgaaatatccagggtaagagagggtgctattattccccattttgcaggaggcgtacacccctctatggtatgttttgtaatatcccaggtaaggggtgctattgagagaagagagcaaaagaccccccccatattgttctgtattattttatactcagtacctgttttaagaagaaacaaggaagcgaaaccaaaggcaggcagcccggcgccaggcaccagatccaaaaccagacccgaaaccaggcctgggccttcctgaccttagcctgaaagttaaaattcaacccatgacctagcaactgatgttatccatagattccagacattgtatggaaggacattgtgaaatttcttgttctgttctgtttcactctgagtactggtgcatgcagcccttgtcacatacccactagattgctcaatcaatcatggccctttcatgtaaaaaccttagtgttgtgagcccttaaaaaggacagaaattgtgcactcaacaagcttggattttgatactctagtctgctgatgcttccagctgattaaaagccacttccttcactacctcggtgtctgtgggattttgtccgcggctcctcctgctacactgtgactccccttatagagaggggtgtacacccccctttggttcctaatatccagcgggggagtaggtgctattactccccatattgcggggagtgtacacccccttgtagtacggatcgtaaaatcaaggagggagagaaggtgtaattatccccatatcacagggagtgtacacccctttgtggtatagtttgtaatatccacgacgggagagaatgctattactccccatatcgtggagggtgtacaccgccctgtagtatggttcgtaatatccggaaggggagaggttgctattactccccatatggtgggaagtgtacacccccatgtgatatggttcataatatccaggggggtagaggatgatattacccacaatatcatagaaggtgcacacccttttgtgatattgtccataaaatccagaaggggagaggatgatattacttccaatatcacagggggtgtgtagccccatatgatattgtttgtaatatcaaggtagggagaggatgctattccttacaatagctcaaggggtgtaaccttcttgtgatattgtttgtaatatccagaaggggagaagataatttttttattttaaaagtaaactttaatgtcaaaaatgcaaacttgagaagggcagaaagatcaaacagaaggctgccacttcacaattggagggttgcacagtggccgggcagaggcgctcctcactccccagacggtgaggcagccgggcagaggtgctcctcacttccgagatgttgcaggagccgggcagaggtgctcctcacttcccagaacagggggctgccgggcagaggtgctcctcactgcccagacggtttgcaggcctggcagaggcactcctcacttcccaaacggagcagcggcaagccagaggcgctccacacttcccagatggtggggcagccgggcagaggcgatcctcacttctcagagggtagggcggcccagcagaggcgctcctcacttcccacatggtggggcggcaggctagaggcgatcctcacttcccagacggtggtgtggccatgcagaggtgctcctcacttcccagatggtgtggccgccgagctgaggcactcctcacttccctgacagtggggcggctgggcagaggcgctcctcacttcccagacacttggactccgggcagagactctcctcatttcccagatggtggggctgccgggcagaggcgctcctcacttcccagacggttcagaggccgggcagaggcgctctggggagaggataatgttactcccaatatcgcagggggtgcacactccctgtgatattgttccgaatatccagagggggaaaggatgatatagctcccaaaatcgtggggagtgtacacccccctgtgatcttgtttgtaataccaagaagaaaagagaatgctattatttccaatatagcagggggagtacaaccccctgtgatattgttcgtaatatctagggggagagaaaattatattagtcttaatatctcaggggacgttcatccccctgtaatattgttggtaatattcagaatggagaagatgatattgttcttaaaatacaggaaaaaatatgataatattacttccaatatcgaagggggtgtacactctcctgtgatattgttcccaatatccagaatgaaagaggatgctattactcccaatatcccagggagtgtacacccctttgccatattgttcataatatccaggggaagacaggataacattactcccaatatcaccgggggtgtccacccactagtgatatttattgttcatcatatccagaaaaggagaggatgatattactcccaatattgcaggtggtgtacggtccctgtgatattctttgaaatatctagaaaaggagaggatgatatcactccgagtatcacagggggtgtacacccccctgtgatattgttcgtaatatccaggggagaaaaggatgatataattgccaatatttcaggggatgtgcacctccctgtgatattgtttgtaatatccaggggtggagaggatgatattactcaaaataacgtaaacatcctgtgtgtacatcccctgtgatattgtttataatatccaggggggtagaagatgacattacccccaatatcacagagtgtacacacccctgggatactgttcataatatccaggcgggaaagaatgaactacttccaatatcgcaggatatgtacacccccctgtgatatatttcctaatatttatgtgggtaaggatattacccccaatatcacagaaggtgtacatcctctttgtgatattattcctaacatccaggaaaggagagaatgatattactcccagtatcgcagggggtgtacaccacccctgtgatattgttgctaatatccagggggagaggataatattactcccaaaatcacaggggacgtacactcctcctgagatattgttcctaatattcatggggaaaagaatgctactactccaaatacagcagagggtgtacaccatccccgtgatattgttttttatatccaaagggtgaaaggctgatattactcccaatatcgcagggggtgtacaggccccccatgatatcattcttaatatccagggaggcaaagaatgatgttactcccaatattgcaggctgtatacaccccccgtgatattgttcctaatatccagagtaagagaggatgacattgctcccaatattgcaggggttgcacgcacgccctgtgataatattactcccaatatcaacagtgggtgtacactcctcctgtgatattgtttgttatatctaagaaagaagaggatgatattactgtcaatatcacagaaggtgtacagccccttgtgatgttgtttctaatatccagcggtgagaggatggtattactcgcaatattgtagggggtgtccaacggccctgtgatattgtttctcatattcaaaaaggaaaagaataatataactccaaatatcgcagggtgtgtacacttccctgtgatattgatcctaatatccaggaagagagaggatgatattaatcccaatatcacagggggtgtacatcgcttctgtgatattcttcctaatatccagggggggaggggatgctattactcttaaaatcgcagggaacttacactcccactatgatatttttcctaatatccaggaagggagaaaatgatattactcctaatatcacatatcacaatgggtgtacatctccccgtgatattgtttctaatatcaaggatgggagaaaattatattactctcaatatcgcagggggtgtgcacacctcctgtgatattgttcctagtatccagcggaggagatgatattactttaaatattgtagaaggtgtacaacccccctttgatattgttcctaatatccagggggaaaggagatgatattactcctaatatcgcaggggctgtacaaccctatgtgatattgtttcttctaatatccaggggtggagaagataatattactcctaaaatcgaaggggacatacactccccctgtgatatttttcctaatatccagaaggaaagaggatgatattactcctaatattacaagaaatgtatacctgtcctgtgatattgttcctaatatccagaggggtaaatgattatattactcccaatatcgcaggggtgtacaccttccctgagatattgtttctaatatgcagtggaggagaggatggtattactcccaacatcacaggagatgtaaactccccttgtgatattcttcctaatgttcaggacgaaggagggtaatattactcactgtattgcagcagggggtgtagagccccctgtgatattgtttttaatattcaaggttggagaaaataatattccttccaatatcgcatggggtgtacacccttctttttatatagtttctaatatctggggggagaggatgatattactcccaatatcgcagggggattacacccccactgtgatattgtttttaatatccagggtgggagaggataatattactccaaatatcccagggctatacaccctccgtgtgatattgtttctaatatccagaggaagagaagatgatattactcccaatgtcacagggtgtgtacaggccttctttgatattgttcttaatatccatgagggagaggatgatattactcccaatatcgcaaagactgtacaccctttctgtgatattgcttccaatatccagggagggagaggatattacactcaggatcacagggggtgtacaccccaacctgtgatattgtttctaatatctagggaaaatgagggtgatattactatcaatatcacaggaggtgtacactcccttatgatattgttcctaatatccaggagaatgacaggataatattactcccaatatcgcgggtggtgtctccccccactccgtgatattgttcctaatacccagagggggagagaatcatattactcccaatatcgcaggggatgtacacctacatccggcggagtagaagataatattactcacaatatcgcaagaagtgttcaccttccctgttatattgttgctaatatccagggagtgagaagatgatattactttcaatactgagcgtgtacactacccctgtgatattgtttctcatatccagtagaggagaaaatcatgttactcccaatattgcaggggtgaacacctcctttgtgatatttttcctaatatcaggaaagggagagtatgatattacccttaatattgacaggggtgtacacccccctttgatattgttccaatatccaggggggcagaggataatattattcccaatatcgcagagggtgtacaccccccgtgatattgttcctaatatccagagaaataaaaaatagtattatttccaatatcacagggcgtacattttccctgtaattttgttcctaatatctggggggtggggtggcaggataatattactctcaatattggagagggtgtacacccccctgtgatattgttcctaatattcagggtgggagagaatgatgttactcccaatatctcaggagtcgtatacacccccttgtgatattttttctaatatccaggaggcagaggatgatattgctcccaatatcgcagggggtatacacccgagctgtgatattgtttctaatatgcaatatgggggaaggatgattttactttcaatatcgcagggaatgtacactttccttgtgattttgttcctaatatccaggggtggagaagatgctattactatattactcctcatatcgcaggcggtgtacaactccctgtgatatggttcagaatatccagagtgaaaaaggagggtgacattactcccaatatcgggggggtgtacacccctttgtgatgtggttggtaatatccaggggggcagatgagggtgatatcactccccatatcgtggaaggcgtccacttttttgtgatgtggttctttatatcccgaggggagaaggtgatattactccccatatcgcgaagggcatacacccccctgtgatatagctcataatattccggagagtggaggaagatactatgccctatatcgcgggtggcctacaaccccctatggtttggcttataatatccaggggggagagggtaatattgctccccatattgtggagacgtacagccccctgtgatatggtttgtaatatctttggggggcgagggtgatattactccccatatcgcggggagcatacacccccgtgatctggttcatagtatctcaaaggaagaagttgatgtgtacaacttaagggaaaaagttgaagtgaagtgtacacacgccctgtgacgtggttcataatatccaggcgggggagaggagagtgatatttactccccatatcgcgggtgttgtaaactcccctgtgatatagttcataatatccaggggagagaggagggtgatattgctcctcatatcgcgaagggtgtacaaccccctgtgatatggttcataatatccagaagggtagaggacgatgatattactccacatatcttgggaggtgtgatatggttcgtaatatccagcgatgagagaatgatattactccccatatcgcaaaaggtgtgatagggtttgtaatatcctgagggggagagggtgatattaatccctatattgcagaaggactacaccctcccatgacatggtttgtaatatcccagggggtagagtgtgatattactttccatatcacagggggtgtgatatgattcgtaatattcgaagggggagagggtgacactactctccatatcacggggtgtgtgatatggttcttaatatcccaggggttagaggttgatattaccccctttttggggggtgtgtacaccccctgtgatatggttcgtaatatcccgggggagacagggtgacattattccccatatcgaggggatcgtacaccccctgtggtgtggttcataatatccctagggggagatggtgatattactccccatatcagggggcgtgcactcttctgtggtataattagtaatatccagggggcagaggtcgatattcgtttccatatcatgaagggagtacacttccctgtgatatggttcctaatatccaggggggagagggtgatattattccccatattgcggggggacatacaacccctgtgatatggttcataataaccagaaaagaagagggtgatattaatccccgtattgcagagggcatacaccccccctgtgatatggtttgtaatatctaggggaggaaaaggtgatattactttccatattgctgggtgcagacacccctttatgatatggttcataatatccaagttggagagggtgatattacttcccatatcatgggaggtatacccttccctgtgatatggttcgtaatatccagaaggggagagattgatattactccccatattgtggggggcgtacaccttcctgtgatacggtttgtaatatctaggggatatagtgggtgatattactcaccatatcacgggggttgtaacatggtttgtaatatccaggggaggagagggtaatgttactccccatatctcggggcatgtacaccctcctgtgacatggttcgtaatatccaggtcgggagagggtgatattactcctcatattgccgggggtgtgttatggttcataatatcctggggaaggaggctgctatcactctccacatcttgggggatgtacactctcctgtgatatggttcataatatccagggtgggtgagggtaatattactccccatatcgcgggaagtgtacatacccctgtaatattgtttgtaatagaagagagggtgatattactccccacatcgcgggtggtgcccacccccctgtgatatggtttggaatatccagggggatgaggagggtgatattactccccatatctcggtgggagtacatccctctttgatcaagttcataatatccaaaaggaaacaggagagtgatattactccccatatcgccgggggtgtacacgggagggggagtacacccccggcgatatggtctgtaatatccagggaaggagaggagggtgatattactcaccatatcgcaggtggtctacatttacctgtgaaacagtttgtaatatccagggggggaaatgagaatgattttttttttttgagtctcactgtgtcacccaggttggagtgcagtggcacgatcttggctcactgcaacccccgcctcctggactcaagcaattctcctctcccagcctcctgaatagctgggactacaggcgcaccccacaacgtctggctaatttttgtatttttattagagacggggtttcaccatattggccaggctgatctcgaactcctgaccctgtgatccatccgcctcggcctccaaaagtgctgagattacagatgtgagccaccacgcatggcccaaggagaacgatattactccccatatcccagggggtgtatatccccctgtgatatggttcagaatatccggaaggaaagacagggatattacttcccatatcgcaaggggtgtgacatggttcgtaatatcccatgggggagagggtaatattactcttcgtattgtgaagggcatacactcccctgtgatacagttcataatattccggggagtagaggaagatattatgctccatatcgcgggtggcataagccccctgtggtttggttcataatatccagggaggagagggtaatattactccccatattgtggggacgtacaccctcctgtgatatggtttgtaatatcccagaggggagagagtgatattactccccatattgcagggacatacacccccctgtgatatggttcaaaatgtcttttttttttgaaggactggttctttatttcaaaaagacacttgtcaatattcattatcaaaacagttgcactattgatttctctttctcccaatcggccccaagtagaccacatcaaaggagagtacatattaagccaataagctgtaggatgtacacctaacagacctcctagaaaccttaccagaaaatggggacagggtagggaaagaaactttaaaagatcaacaaactgccagcccacggactgcaggggctgtcacagccagatggggtggccagggtgccacaaacccaaagaagcaaagtttcaaaataatataaaatttaaaaagttttgtacataagctattcaagatttctccagcactgactgatacaaagcacaatgagatggcacttgtagagacagcagcttcaaactcagaaaagggtaatgagatgagtttcacatggctaaatcagtggcaaaaacacaatcttctttctttctttctttctttcaaggaggcaagaaaagcaattaagtgctcacctcaacataaggggaacatgatccattctgtaagcagttgggagggggtagagatggaacaaaattttggtctcagaggtcttgccatcttaatttggtcacttctaatgaaaaaaataaaaaatagaaataacattatccaaaggtatcttaaagctgaaaacttgaacagcacattttttgttgttgttgtttggctaactcctcctggaaccacctttctggcttagctagtactttgtacagagcaatgaggcttcccatagtggagtctccctgggctctgtttggctctcagcaaggcaggcctataccttttcctctcctccatggagagaggaatatgcattaaggtgaaaaatcaccttccaaaagtgagaaagggattcgatcgctgcttcagggctgtggtattatatggaatgttttacaaaaggttgctacaaaacaacaaaagaggtaattacaaaatgtgtacatcacaacatactttttaaagacattatgcattgtgctcacattcccttaaatgttgtttccaaaggtgctcagcctctagcccagctggaatctccgggaagaggcggacagtttggtgaaaaagacacagggaaggagcgggcggcggaaggagggggcggcgaaaggagaaagcagccttccagttaaagatcagccctcaattaaaggtcagcttcgggcaggctggcctcaggcggagtctggttcagagggaggagcagcagcagggtgagactgaggcgttctacatctcattcaggtcaagcagagtctggtccagcatcctttgtgtacagaggtgctcccctttggtgcatttcagtttatcttccaagtcatcaattgtcttttccagcttggctaccgatctctcagcaaactcagcatgggtctccgcctcctttattttatcagtaagaatcttgatctcttcctcatatttgtcttctttttgagagtacttttcttcagcagcactcagacacttcaggttctggtccatcagtctaatctgctcatccatctctcggcaaagggattctgccagctcagctcgttcctctgtgcgttccaagtctccttcaatgatcaccaacttacgagccacctcttcatacttcctatctgcctcttctgcaatgtgcttagcttctctgagttggatttcctggagttccatcttttcttcatcttttaaggcccggttttcaataaccttcttacctctctcactctcatcagcagctttttccgcttcttccagcttttgcagggcagtagccaggtgctcctgagcacggtccagctcctcttcaaccagctggatcccacgttcaaggaggccacctcagcctcagcctgttcccgggcccacctttctccctcaacttctcgctggaggcgctcagctcgctcctctgcatcatctgcctgctgctgcagaacctggatcttgcgcttcaccgcctcgatggtggtgatcccagccatggtgcccacccagctactgctagagctccggttcctgcctcctccgatcggcgttgcagcctcctctcacccttacttccgcctcggttcaaaatatcttaagggaaggagttgatattactccccacatcacgggaagtttacatcccctggtgatatggtttgtaatatcccagggtggatagggtgatattactctccatatcgcgaaggagtactcccccctgtgatatggttcataatatccttggggggagagtgtgatattactccccatatcgcgagggccatatactcctttgtgacatggttcgaaatatcccggtgggggagggggtagagggtaatattactccccatacagcgaagagcatacgcccttctgtggcaaggttagtaatacttcagggaaaagagtgcaatattacttttcatattgcagggaacatacactcccctgtgacatggttcgtaatatcccgggggctgagagggtgatatttctccccatatcaccgggggcctacacctgggtgtgatatggctcataatatacagggagggagagggtgatattactccacataccgagtgaggggttacacaccctcgtgacatgttcgaaataccccaaggaggagacaatgatattactttccctgtcgcgggggctacaccctcccagtgatatggttcacaatatcccggggtggagagggtgatattactccctatatcaccggggggtgtacacttccctgggaaatggtttacagtatccccggggggagagggtactattactccccatatcacgttacatatcagggtacacccccacgtgatatggtttgtaacatcccaggaggaagaaaatgatattactccccatatcgcggtggcatacacccctccccgttaaatggttcataatatcttggggtggagagggtgatattactccccatatcacgtggggcatacaccccactatgatatggttcataatatcccggaggggagagggagatattactctccatgtcgcggggggcatatacacccctgtgatatggtttgtgatatcccgggggcggagagggagatattactctccatatcgtggggtcgtacacttttctgtgatatgattcgtaatatccagacggggagagggtgatattacttcccatattgcgggggcgtacacccctctgtgatatggttcataatatcccgaagaaaagagggtgatattactcctcatatcgcggggaacacacaccaccctgtgatatggtttgtaatattcagcgggggagagagtaatattactccctgtatctcggatggcgtacactcccctgtgatatggttcataatatccagaagaaaagagggtgatattactccccatattccagggaatgtacaccaccctttgaatatggttcgtaatatccaggaggggagagggtaatattgctcccaatatcgaaggaggtgttatacggttagtaatatccagagaaggagagggtgacattactccccacatcgtggtgggtgtgcacccacctgtgatatggttcataatattcaggttaagagaggtgatattgctttccatatcgccaagggtgtacactcccgtgaaatacagttcgtaatatccaaaaggggagagggtgatattactcccatatcgtggggggtgtacacccctctgtgatatggttcataatatccagggtggaataaggtggtattactccctgtatctcggggcatgtacatcgcctgtgatatgattcataatatccagaagaagagagggtgatattaatctccatattgctgggggtgtacaaccccctgttgtatggtttgttacactgagttggggagagggttacattactctcaatatcgagtggggcatacacacttatgtgatatggttcataatatcccagggaggagagggtgatattactccccatatcgcgggaggcatacaccccaatgtgatatggtttgtaatatctacatttttttttttgagacgaagtctcgctcttgtcccccaggctggagtatgatggccggatctcggctcactgcaacctcagcctcccgggttcaagcgattctcctgccttggtcccccaagaagttgggattacaggcgcacaccaccacgcccggctactttttgtatttttagtagagaaggggtttcaccatgttggccaggctggtctagaactcctgacctcagatgatccacctgcctcggcctcccaaagtgctgggattacaggcgtgagccactgcacctggcctggtttgtaatatctatgaagggggaaggtgatattactttccatatcacgggaggcgtacaccacgatgtgatatggtttgtaatatccagggggtatactgggtgatattactccccatatcgcggggagtgtatacccttttgtgatatggttcctaatattaagctgaggagaaggtaatattactccccatatcgcaggggtttttatatggttcataatattcaggaagagagagggtgacattactctccatatcacggggtgtgtactcccccatgtgatatggtttgtaatatccagggaaggagaggttaatattactccccatatcgcagggggtgtacacctctctgtggtttgtaatatccaaagggaagaggatgatattatcttcaatatcttggggggatacagtccccagtgatattgttcataatatccagagggggaggggatgatattactcccaatattgcaggtggtgtacaaccccctgtgatattctttataatatagagggggatgatgatattactcccaatatagtaaacaacctgtgtgtacaccccctgtgatattgtttataatatccaagggtggaaaggatgatattactcctcatatcgcagggggtgtatacccctctgtgacattgttcctaatattcaggggaggagaagatgatactactcctcatatcacaggggatgtacacccccctgtgatacttttggtaatatccaggggaggagaaaattatattattccccatgtcacagagggtgtacaccccgctgtgatagtgttcataatatccaggtgaaaagaggatgatattactccgaatatctcaggaagtgtacacccttctgtgatattgttcataatatccaaaggtggagaggaggatactactccccatatcgcagtgggtgtacacccccctgtgatatggttcataatatccaatgtaggagaggatgatattactttccatatcgcggagagtgtacatccccctgttatattgtttgtaatattcagggagaaagaggatactactactccccatatcacacggggtgtatattcccctgtgatatggttcctgatatccaagagatattataatcctctcttggattatgctacctctcatatcgcatggggtgtacacacactttgtgatatcgtttgtcatatccaaggagggagaggattatattaatcccaagatcacggggggtgtacaccctcctgtgatattgtttgtaatattaaggggggagaggataatattactcccaatataattaacaccctgtgtgtactcctccttgtaatattgttcataatatccaatgggggagacgatgatattactttcaatatcgcagaggatgtacatccctttgtaacaatgtttgtaatataaaaggcaagagaggatgatactacttccaaaattgcaggacatgtacaccccccggtgatattgttcctaatatccagtggggaagaggatgatagtagtcccaatatcgcaaagggtgtacacaccccctgggatattgttcctaatataaaaggaggagaggatgctattattcccaatatcacagaaggtgtaaaatcccctgtgatattgttcgtaatattcaggaggggagaggattatattactcccaatatcacagggtgtgtacacagggaggggcaagggccagaagcgggcgggaatccccatgtttgggcggacccagtttctaatggccagcatttgccaatcaaagcttaccagagaactctaaaagccagggctttcctgctagacaagactcatttctggaactgctttaaaaagaaacaaaacttcccaaggaccccttttcctctctgtctgcctaaaataatgttttaaaaactcctaaagcagctgaattcagcccccttcctgggggaatgtatagacggaactcccacctttcccggcatcccaaggccagagtatgtgaaactcctgggtctctatgtgtgtctgagcggctgctctgccaacactccacacagccctgtgtcctggacccaaggcccttatgacctgagctcaagaggggatctcctgatccatgggttgcaaagatccatgggagaagcatggtttctggggcggggtcacacgctcagtcactgtttccctcggatgccggagatggttcctttggctctctgccaatacagggtgaatcatcatccatccctcttttctttgttctcccgggtcaagttgtttgcctagtcagtcccaatgtgagaacctgaatatttcagttgacgcgctgacttcaaaatccccgggcttcgggaggcggagcttgcagtgagccgagatcccgccactgcactccagcctgggcgacagagcgagactccgtctcaaaaaaaaaaaaaaaaaaaaaaaaaaaaaagtccccgggcttttcttttcactcagtggaaggcagctgcttctaattggccatcttggcccgcccccaccacgtgaccttctgtaaaatgcctccactctccaggaacgctctcattatataactttgcctgaaaccaacagcacgctcattgcacatatcatgggctcatttatttcacttataaagaacctggccaaggaagagatagtgcctaaagtggccagtattctgaccgatatgttagaaaaatggtgtgccgaccaattcatgacatgtgtcccaaaactagcaacggaaattgtattcgccgtgttgaggtctctaatccagatgatgctcatctatgtactggaaaaggcagagtcctttcctgacaagctgctgaaactcttcagaaacatctcatatttcctgaagaagatgatgtctggacaagcagcacaggtcgttcagatttaactttctattcatatatccagcacgatattcgcacaattgtcacgaaaccttaccagttgatgagtcctgcacatttcctttaatttcaggaggaagagggtaatccggatgagttttctgacctactctgctgctgtgattaaacaaccaccaggaaattttgacgacactgttctcctgagctcctccctttcctccgggaacaaaacaattgaatttacaaaaataaagtgttatttgactggagtgaggtctcatgtctgcttatgcggtggctcgctgctcagaacagggtgagtctctgggttgtgtgctgaggaggggaggctctcaatctggagaaaacccactgcaggggacacctccatggggtctgagggactgaggatgaggagccggactgggtctagggaaggaggaggtttcagagggtgaaattctggcactaaagcctgggggtgtttgggaacttcctccttccgaagaagtttcagggagggataaagacaaaccctgggctccttgaggggcccttactaatttgagaggactctatcgggaaggagagtgacaatggcctccttgaggactgaggcccctgaataaatgaggcccagatacagtccatgggggatgagaccttcaagggtcacattttggttgggacagaggaaaagtgcagctctgcagccgcagaggaaaacccggcagtgtgaaagcgaccttggaggggccctgtgcgctctgaatgcgtctgagcccccatcccctgtccccgcctctctttctggattcttccagctcggctgtctccgccatcttctgagcgctccaccctgacttattcaagtttcccttctgccttccaagtactccaaaatctttcagatctgtgtccctacccctgtttttagcatgtgttggggctccaggtccctgaaggtttctggcctgaaatccacctccccagcggagtggactgcgttctagagactccacactccgcgaggttcccaggcccctgagggacaaccgagtggcctgcgcacttcagggctccacactcggcaaggtctttcaagcccttggggtccccttcttagttttttccacctttctgggctgcagtcactccataaatgctgggatctgatccccacccccactctcgtttcctcaattctgcgggctacacgctctggcaaggtcctccgggccctggatcccctccctctccctatgcccacgctcctagtcagcccttctggggtccactattttcaggaactaaccgttctcatggagccttgctaaccggaaagctgtgtggaagaaaggctttgaggatagaggtggagatttggctcttccatagtgccactcacccaccccaccatgctgccactgccagacccggacccctgtttcagaacaagtgaccagattcgctcctggacagccctggacactggccttttctctgaaaactactcaccctttctctagtccccacttcatgccagcctcataccctcttccttcccccacgctggcttccgggatcctcctctgctcagacaacctcttctgtgtcccacccccgtttttagaatgctttggggcaccaggttgggggaaggtttctggcctgatatccatctctttccaaactcccttcttcccttgaaaggcttcttgccttcagccccacttctggctccgaggtttcaggacaccctcctcttcatcctcattcttttgaccaccagctttttaggaattcgaacgtccctctcatcttcgtgaatcctgtccaggcatttgttgaccccttcatctgatacccctgacctcacattgccaaaagtctacccctacccagtacactggaattagacaaaatcccaggagttttacctcaactctgagtgtgcccacaggagctctccctgaagccacgtccttttaagcagggtctagggttcctcccttgtcttaatgaactctttgtcacacggaggacgttatggagcccttatgatctttcactgcctttctgcccagcgttttgtctttccatggacatttataatattttccatggacattttgttctctcaatgtccacccctaatttccaacatcccaaagattctcatgtgtttcctgaaagccatttacaggaatggctgtgcccagacccccttccccaggatcctccttcacacctggtaggtgcctctcctagagagatttgcactcagttgtcgtgcagtcacatggcccagatggttgttaatcacccccttcctggcaacagctagcagccagggaatcactggcacagaaacctcagggtgaccaagatgaggccacctctgtgctgaaggctgtgctccagagcctgcttgggatcaggcttaagcaggtcttcagccagacctgatgttacctggtttccttgagctgccctgcctgagctatcgggagcactccctcaatgcacatcttgattccctatctcatgctctgcttctagaaaccatgagctatcaattgctactggcaatggtcctgggaagtcaaccctaagtatggattctggggttggatgactccccacaggacttcagtgagcaacaatcactgctggcagttggaggacagagtcgctagggcatgtgaccactgtgaaaccaccgatgtttcacctggggtaattttggatgaactacggtagaagcactgaaggtacattgcttttggtttggaagattgtaggtaaataatagcgatatgaatgtggaattggatggctgcaaacgagtgccattgatgcattgaaagaggaaaagtcaggctgtcacctgtcactcagcaatttaaagtgtgagagttgggactagatgtggtggctcacatctataatccagagattcgggggaagcttgaagaggtaggatcttttgagtccaggagttccagaccagcctggacaccagagcaagacctcatctctacaacaaaattttcttaaaaattagatgggcttggtggcacgcacctgtacttgtagatctagctaatggggagcatgagataaaaaaatcacctgagtcagggacttaggggttacaatgaggtatgattgtgccagtgcacacactcccacctggccaacagagtgagattctgcttccaaaaaaataagaaataaatcaggtttgagagttggaaagcatcatcttctcctagagccaaaggacatgtacaactgagacccaggaacaaagcttcatcacaaagagaccatcatcagtggagccgggagatgcattccccctcaccctgccttgaggaggcagtggagtcatctgtctgggatcctttctgacccagccctatttgtttgtctctttggcttctttggatttgtatattttagctgttataacactgtaaaacaaacagagtgatttttttgagttgtgtgaatgatgctagctccatagtcaccctgagagtgatgggaacttttgaatttgtggcaagttggagggtagtgtaagtgacctgagattgccaaattggggctagcactggatgtgaggttaggctagtggaaaaatatgcccagaaccagaggagtgtgggctcactgcaggtggttaggctcagatccaaattgtacagatggatagctttggggtaaagaataacatagttgagaagtgcatgtgttagtctgttcatgcactgctataaagaattacctgagactgggtaattatttataaaactcaggtttaattgggtcatggttccacaggctgtacaaaaagtatgatgctggccatcagctcaacttctggggaggccccagaatagttagagtcatggcaaaaagtacaagggaagcaggctcatcttccacggccagagctggagcaagtggtaggagaggtgatacacactttcaaacaagtaggtcttttgagaactccatcaccggacagcacctatgggatggtgctaaattattcatgaaatatccgcctccataatccactcaactgtcaccagcgcagccagccccacctccaacagtggggattacaattccatatgaggtgtgggtggggacacagctccaacctcaatcagtgggcatcctggattgggtctactatagaaggagaaccaggagctgactatgatcttgaaccctacccatgatggccgggcggggtgactcatgcctgtaaccccagcactttgggaggctgaggtgggtggatcgcctgaagtcaggagttagagaccagcctggccaacatggtgaaaacctgtctctactaaaaatacaaaaaattagaccggcgttgtgctggatgcctgtaatcacaccactacgctccagcatgggaaaaaataccaaaacttcgtctcaaaaaaaaaaaaaaaaaaaaaaaaaaaaagactgcccatgaccactgcaccagtgagagggacaccagcatcactgagatgcaagggctggacattcttcataggtcagagctcaaagcaggggacactgatacagagatgggctccatccatagcaccaaagtggtgagaggatgtgggaatggcagaggccagcactttgccatcaatgcaagggggtataaggaggtgacaccagtgccagagtacatcacggggggactgccctacaatatctaggacttacctcttagagcgtgtttcattagcgacaacagatataaatggcagacaggtgtgtccctgcattaacaggaaatagaaatcatcaagaggaacagaaggcagatgtcagcagccccttagaaagtcatcatccttcatacagttaaaatctgagacagttctcacacgagaaggcctaactcaaaaagaggctgggttctcatgaggcaggtttatgcaaaaccaaggaaggtgtacaagtttggaattctccagtttcccttggaaaagacctacagtcatttgcttaggtaactgagcactgaacaaaggtgagtattgttgtcttttagaagctcttggccaagaaggccttgttggcataaaacccatggtttggaaacatcaccatgacccctgttagagtaatggcctaagggtgggggtcaggaaattgatgtattccttgccaacttctgcctctaagtgagtgaactctgtttgtgaacctctctcctctgtggttatgttcctaggctctcatgtataatcaggagtcatagacttagaaacaggaaaaatacttacagtgtttttgtggcctgtgagctatgacttataattttaggaaaaaaacaattgcaaatggaaagcctaagtctatcaatgctcatccaagacaacataatcaataaaaaccaatatcaaatctcaaggcaaattatttcctgtatatagatggcagagatgagcaccaccatcaaaaactcaaggaccagtgctgtgggtccagtcatctgtttcatggaattcaccagtctggtatcttcaaaatccagaaggatgatggcagatggcaggaaagtaatgcaaacgtcatcaggtgtgaccccactgtagcagctgtgatggatgttttctctcaccatagcaataaataacacaacctcggtcacactgtatgcattgttggtctgcaaaatccatgttttgcaaaactcttcaggaaggtggatctgtaatattggcattgacatgagaacaacagcagtatttattcacaatctcaagctctctgtcttcccgtctctctcattagccatccaagtagtcctgaggaaccaagcccatcagaacattctgcaacataatacacagctccattctccattcaaattttgttgttgttgttgttgttgatgagacaacatcttactccatcagccaggctgacgtacagtggggctatctgggctgactgtagtcttgagcttccaggctcaaggcatcctctcacctcagcctcctaagtggcttgaactacagacacacagcgacatgctgggctagtttttgtatattttgtagagacgtgctctcaccatgttattcaggctggactcaaactcctgagcgtaagtgatccaagcaccttggcctcaaagtgctgagattacaagcctgagccactgcacccagcccaatctccattctactgataacaatgtcattaccaggtctgatggacaggaaatggtaaggtttctgaaaacctaaggatcacacagcgagttccaaaggctgaaagtgcatacctgtcgacactgataccaatgacatccaatggtgagaatgacattccttgtagtcctagctctgctcataacaaatctatactgaagtgtaagagtttgatggtcatggggattttccatgtctctgcctttcagcgatgtgccatatctgtgaagtgttcagaaatgcaacagcctgaggcatgctgggcatatcctctaataaaaaggaaaatgccattttatggtcctgtatttctacaagttggaacacatgggcctgtgatccagatgggggaaatgggaatattcccactcattcaccttcatccacgaagcccatttgaaagctttgggcttcccatccttgtagattttagtgttgtgggctgggtgcagtggctttcacctgtactgccaacactttgggaggcctagacaggtgaatccactgaggccaaaagttcgagaccagcctggccaagatggtgaaaccccgtccctactaaaaatacaaaaattagcaaggtattggggccagcacctgtaatcccagctgctcgggaggctgaggctggagaatcgcttgaacccaaaaggcagagactgcagtgacccgatcctgcctttgcactccacctgggcaagcagaacaaaacttctgtcttgaaaaaaaaaacaaaaaacgaacaaaaaagatgttagagttctgggtttagaggtctataccccagaaagagaatggtttcaacaagggacaaagaagttgctttaaacgttgacttgccatttcttttcagtgtgtttgttctcttgcgtcaagagaccaccagaaaagtggtgcaattactctcctgtcaagaatcattgactatcatctgcaagagggtcagatcctggtatataattagggcagaaatacttagtctgagaagggtatgacatccagaggccctattaatgatgtccttttctccatgcctgactctgaccccatgtgctggactgcccctgtgtggatggcctcatggcctgctcggactctgaggtcccaccccaagtggcacctccatggagggctctactcttgtatgggctctgacactcacactgagacactctcccatggacacctcttcacccacttggggtctgaaactgggctactccatccctccctaacctggaacagagagctttcactgctattacacaagtcatagaggctaactcctcatttttccaagctaattattgaaacattagtcctgggttgataagacaagataagttaacttttcataaatttgcttatcaagttttgaataaattcaaataaattcaccttccccacacaccttagttgtcgacatcacacgcgcacccatactcacagggtgagcacgaaggcttcactgtcagtggagaaagtggcaaaacccttctgtgcctcatcctggtctagacctggccctcatcctttcccactcttcccctcactcccttggattcatccacactggcctcctgcctgctgctccacctccctgcgaagctcacccctgcctcagggcctttgcacgtgcagtggcttcaagccatatcctcttcacccagatctcccagatctcctgaatgatcttcttttatcattcaggtctcagcttgcatgtaatcttctcagtgaggattacccaaaccacatagttcattcattcattcaaatattcattcaatggcatattgacaaagcagctacttcatgccaggccttgggccaggtgttatggatatggcaacaaacaaaacaagagttttctgctctcaaatttttacccacttaaaggagatatcatacatcatctgtaaataaatacatcatctgtaaataatgatgtaaataaatacatcatctgtaaatctgtaaataatgatgtaaataaatacatcatctgtaaataaataaagtataataaaagaaaatagtaggtttttttggttggaggtgaccgtgaagtttgcaaataccatcttacaacacattattttattttatttcatttcatttttaattttattattattatactttaagttttagggtacatgtgcacaacgtgcagatttgttacatatgtatacatgtgtgaagttggtgtgctgcacccattaactcgtcatttagcattaggtatatctcctaatgctatccttcccccctcccccaccccacaacagtccccggtgtgtgatgttccccttcctgtgtccatgtgttctcattgttcagttcccccctatgagtgagaacatgcggtatttggttttttgtccttgtgatagtttgctgagaatgatggtttccagcttcatccatgtccctacaaaggacacgaactcatcattttttatggctgcatagtattccatggtgtatatgtgccacattttcttcatccagtctatcattgttggatatttgggttggttccaagtctttgctattgtgaagagtgccgcaataaacatacgtgtgcgtgtgtctttatagcagcatgatttataatcctttgggtatatacccagtaatgggatggctgggtcaaatggtatttctagctctagatcactgaggaatcgccacactgacttccacagtggttgaactagtttacagtcccaccaacagtgtaaaagtgttcctatttctccacatcctctccagcacctgttgtttcctgactttttaatgatcgccattctaactggtgtgagatggtatctcactgtggctttgatttgcatttctctgatggccagtgatgatgagcatttcttcatgtgttttttggctgcataaatgtcttcttttgagaaatgtctgttcatatccttcacccactttttgatggggttgtttgtttttttcttgtaaatttgtttgagttcattgtagattctggatattagccctttgtcagatgagtaggttgtgaaaattttctcccattctgcaggttacctgttcactctgatggtagtttcttttgctgtgcagaagctctttagtttaattagatcccatttgtcaattttggcttttgttgccattgcttttggtgttttagacatgaagtccttgcccgtgcctatgacctgaatggaaatgcctgggttttcttctagggtttttatggtttgaggtctaacatgtaagtctttaatccatcttgaattaatttttgtataaggtgtaaggaagggatccagtttcacctttctacatatggctagcctgttttcccagaaccatttattaaatagggaatcctttccccacttcttgtttttgtcaggtgtgtcaaagatcagatagttgtagatatgtgacattatttctgaggactctgttctgttgcattggtctatatctctgttttggtaccagtaccatgctgttttggttactgtagccttgtagtatagtttgaagtcaggtagcatgatgcctccagctttgctcttttggcttaggattgactttgcaatgcggggtcttttttggttccatgtgaactttaaagtagttttttccaattctgtgaagaaagtcattggtagcttgatggggatggcattgaatctataaattaccttgggcagtatggccattttcacgatattgattcttcctacccatgagcatggaatgttcttccatttgtttgtatcctcttttatttcattgagcagtggttttagttctccttgaagaggtccttcacatcccttgtaagttgggttcctaggtattttattccctttgaagcaattgtgaatgggagttcactcatgatttggctctctgtttgtctgttattggtgtataagaatgcttgtgatttttgtacattgattttgtatcctgagactttgctgaagttgcttatcagcttaaggagattttgggctgagacaatgggttttctagatatacaatcatgtcgtctgcaaacagggacaatttgacttcctcttttcctaattgaataccctttatttccttctcctgcctaattgccctggccagaacttccaacactatgttgaataggagtggtgagagagggcatccctgtcttgtgccagttttcaaagggaatgcttccagtttttgcccattcagtatgatattggctgtgggtttgtcatagatagctcttattattttgagatatgtcccatcaatacctaattattgagagttttcagcatgaagggttgttgaattttgtcaaaggccttttctgcatctattgagataatcatgtggtttttgtctttgggtctgtttatatgctggattacatttattgatttgcatatattgaaccagccttgcatcccagggatgaagcccacttgatcatggtggataagctttttgatgtgctgctggattcggtttgccagtattttactgaggacttttgcatcaatgttcatcaaggatattggtctaaaattctcttttttggttgtgtctctgcctggctttggtatcaggatgatgctggcctcataaaatgagttagggaggattccctctttttctattgattggaatagtttcaggaggaatggtaccagttcctccttgtacctctggtagaattgggctgtgaatccatctggtcctggactgtttttggttggtaagctattgattattgccacaatttcagatcctgttattgctctattcagagattcaacttcttcctggtttagtcttgggaaggtgtatgtgtccaggaatttatccatttcttctagattttctagtttatttgcgtagaggtgtttgtagtattctctgatggtagtttgtatttctgtgggatcagtggtgatatcacctttatcattttttattgcatctatttgattcttctctctttttttctttattagtcttgctaccggtctatcaattttgttgatccttttaaaaaaccagctcctggattcattaattttttgaagggttttttgtgtctctatttccttcagttctgctctgattttagttatttcttgccttctgctagcttttgaatgtgtttgctcttgcttttctagttcttttaattgtgatgttagggtgtcaattttggatctttcctgctttctcttgtgggcatttagtgttataaatttccctctacacactgctttgaatgtgtcccagagattgtggtatgttgtgtcttttttctcgttggtttcaaagaacatctttatttctgccttcattttgttatgtacccagtagtcattcaggagcaggttgttcagtttccatgtagttgagcggttttgagtgagtttcttaatcctgagttctagtttgattgcactgtggtctgagagacagtttgttataatttctgttcttttacatttgctgaggagagctttacttccaagtatgtggtcaattttggaataggtgtggtgtgatgctgaaaaaaatgtatattctgttgatttggggtggagagttctgtagatgtctattaggtccgcttggtgcagagctgagttcaaatcctgggtatccttgttaactttctgtctcattgatctgtctaatgttgacagtggggtgttaaagtctcccattattattgtgtgggagtctaagtctctttgtaggtcactcaggacttgctttatgaatctgggtgctcctgtattgggtgcatatatatttaggatagttagctcttcttgttgaattgatccctttaccattatgtaatggccttttttgtctcttacgatatttgttggtttaaagcctgttttatcagagactaggattgcaacacctgcctttttttgttttccattttcttggtagatcttcctccatccctttattttgagcttatgtgtgtctctgcacgtgagatgggtttcctgaatacagcacactgatgggtcttgactctttatccaatttgccagtctgtgtcttttaattggagcatttagcccatttacatttaaggttaatattgttatgtgtgaatttgatcctgtcgttatgatgttagctggttattttgctcattggttgatgcggtttcttcctagccttgatggtctttacaatttggcatgtttttgcagtggctggtactgactgttcctttccatgtttagcgcttccttcaggagctcttttagggcaggtctggtggtgacaaaatccctcagcatttgcttgtctgtaaaggattttatttctccttcacttatgaagcttagtttggctggatatgaaattctgggttgaaaattcttttctttaagaatgttgaatattggcccccactgtcttctggcttctagagtttctgccaagagatcagccgttagtctgatgggcttccctttgtgggtaacccgacctttctctctggctgcccttaacattttttccttcatttcaactttggtgaatctgacaattatgtgtcttggagttgctcttcttgaggagtatctttgtggcattctctgtatttcctgaatttgaatgttggcctgccttgctaggttgcagaagttctcctgggtaatatcctgaagagtgttttccagcttggttccattctccccatcactttcaggtacactaatcaaacgtagatttaatcttttcacatagttccatatttcttggaggctttgtttgtttctttttactctctttcctctaaacttctcttctcacttcatttcattaatttgatcttcattcacttatatactttcttccacttcatcaaatcggctactgaaggtattgcatgcatcatgtagttctcatgccatggttttcagctctatcaggtcatttaaggtcttctgtacattgttttctctacttagccattcgtctaatcttttttcaaggtttttagcttccttgtgatgggtttgaacatcccctttagctcagagatgtttgttattactgaccttctgaagcctgcttctgtcaacttgtcaaagtcattctccatccagctttgttccattgctggtgaggagctgcgatcctttggaggagaagaggtgctctggtttatagaattttcagcttttctgctctggtttctccccatctttgtggttttatctacctttggtctttgataatggtgacctagagatggggttttggtgtggatgtcctttttgttgatgttgatgctgttcctttctgtttgttagttttccttcgaacagtcaggttcctcagctgcaggtctgttggagtttgccggaggtccactccagaccctgtttgcctgggtatcaccagcggaggctgcagaatagcaaatattgcacaacagcaaatattgctgcctgatccttcctctggaagcttcgtctcaaaggggtgcctggctgtatgaggtgtcagttggcccctactgggaggtgtctcccagttaggctagatgggggttagggacccacttgagaaggcagcctgtccattcacagagctcaaacactatgctaggagagccactgctctcttcagtgctgtcagatggggatgtttaagtctgcagaaatttctgctgccttttattcagctatgccctgcccctacagatggagtctacagaggcaggcaggcctcattgagctgcggtgggctcctcccagttcgagcttccagaccactttgtttacctactgaagcctcagaaatggtgaacacccctcccccacccagtctgccgccttgcagttccatctcagactgctgtgctagcagtgagcgaggctccatgggcgtgggacccactgagccaggcacaggatataatctcctggtgtgccatttgctaagaccattggaaaagcacagtattaaggtgggagtgtcccaattttcccagtacagtctgtcacgggttccctcatctaggaaaggtaaatcccctaaccccttgtgcttcccggtgacgcaatgccccaccctgcttcagctagccctccatgggctgcatccactgtccaaccagcccaatgagatgaacaaggtacctcagttggaaatgcagaaatcacccatcttctgtgtggatcaggctgggagctgcagaccggagttgctcctattcggccatcttggaatggcaatctatgtttgctttttacatttgaaaaaactggtgtcacgtacctaggtattaatcattgtggtatcctcttgccgatttacctctttatcattaactagtgaccctccttgtcttttgttgttacagtctgtgattttagtctattttatctaatatgagaatagctactctggcacttttttggtttccagcttcatgaaatatccttttccatttccctgttttcatttccctttcggtgtctctatagatgaagttgatttctttaaggcaccataagttgggtcttatttctttatccatttgaccatttagagaatttagaacactgtcagtgttattattcataagtaaaaacttaagagtgggtgtagtggtgtacatctgtatttcctgcactttgagagactgaggcgagctgatctcctggggtcaggagtttgagaccggcctggtcaacatgatgaaaccctgtctctactaaaaatacaaaaattagccaagcatgctggcatgtgcctgtaatccaatttacttgggaggctgaggcaggagaagcttgaacctgggagacaaatgttgcagtgagctgagatcacacagagaagtcatctccactctcctcatcagaacctcttgttcacagcatttgtgagcacaaatcaatgatggttattctttcctactaattagggatattttattacacagcaatagcctccagcaaagggaaccatcatacatgattcctacaagttgacagggctggaattatcactgaaaaactaaggtggctatacttgattcccaatgtccaatttttcatgaatagagaaatttatcctttttccccccagccagaaaccaagttttgctcttacgcccaggctggaatcaagtggcacaatctcagctcactgcaacctctgccccccagcttcaagaaattcaccttttgaacaaggagatattaaggatacactatgtgtatgctaccggtggttgcaggagactcagaaaagagagaaacagtcactggcctcgtgcaactgatattctcgggaggagagaaaggcaatcaagaaagaaacatgctgtatttcagacagctgtaagtcctccacaagaaaagaaagcaggtgaggaacataggaaatgtgtcaaccataaggttcccgctaattctataagttggtcagggatatcctccaagaataagcagcatctgagcaatcacctgaagggaggaaggaaggaagactgtgagtggtggcttacacctgtaatcccagcactttgggaggccaaggagggcagattgcctgagctcaggagttcacgaccactcagagcaacctgttgatacccaatctctactaaaaacacacaaaaaaattacccgggtgtggtggcacgcacctgtagtcccagcttccatgcccagctgatttctctctctccatatatatatatatatacacatatattgtttttgcagagatagggtctcactgtgtcacccagtcatcaagcaattctcttatactgttttggaaaagcatgggaattacaggtgtgaaataccctgctggtcctgaaaaatgtgatatttgggattctctgcctggcttgttttacccaaaataatgacctccagttccttccaggttgctgcaaaagacatgattttcactgttttataactgaatagtattcctgtatgtatacataccacattttctttatttattcttctgttgattgacatgtagggtgattccatgtctttgctactgtaaataatgctgcagcaaatatttgtgtgcattttgatctattcctttgagtaggtacccagtactgcaactgcaggactgagtagttgttatattttttgttctttcagaaatctccatagtgtttgccataaaatctgcactaatttacattcccaacaacaatgcataagatttccccttttctccacattctcactaacatttgttatgtttttgtctttttcataatacccattctgactggagtaagatatctcattgtggtggttgttgatatttttgagacggggtctcactctgttgccagactggagtgcagtggtgtgatcgtggcttgctgcaacctccacctcccgggttcaagcaattctcctgcctcagcctcccgagtagctgggactacaggcgcgtgccaacaggcctggctcattttttgtatttttagtaaagacagggtttcaccatgttggccaggatgatcacagtctcttgagctcatcatacacctgcctcagcctcccaaagtgttggaattacagtcatgaggcagcgcacccaacctcaatgtggttttaatgaccatttctctgacgattcatggtgtggagaatttctttgaaataccttttggccatttatatgtgctcttttaaaaactgactcctgtccaggtgcggttgagcatgcctgtaaccccagaacttcgggaggctgaggccaatggatcacttgaggcaaagaggcagaaatcagcctggccaacaaggcaaaaccccatctttactaaaaatacaaaaaatcagccacgggctgtgactcgtgcctgtggtgcaagttactcaggaggttaaggcacaggaattgcttgaacccggtaggcacaggtcacagtgagccaagatcatggcactgcactacagcatgggtaatagagaaagacctgtctcataaaaacaaatgaataaataaataagataaaaaataaaaaagtctctttatgtcctttgccgactttttaatgggattctttggagttttctgttgtagttgagatctttgtttactctcggtattagtcttttgtcaaaggaaaagtttacaaataatttcttccgttctgcagtttgtctgctcactctgttgagaggattatttctttggctgtgcagcagctttttgtttcagtaaagcttttgaatttatataattaaaattttcagtttggtttaaatttgcactggtcgatttttggttttgttgcctgtacttttgaagtcatactcttgaactctttactagacaataaccagaagagttttctctagttttcttctcacatttttattatttcagtacatatatttaagtctataattcatcttcaattgatttttgtagaaatagtgagaaataggagtccaggtttattcttctgcaaatgacaattcaattgttccagcaccaattattgaaaagggtgtgctttcctcaacgtatattcttatcagctttgtcaaagatcagttggctataaatgtgtggctttctttctgggctctctagtctgttacatcaatctgtgtgtctatctgtatactactaccatgctgtattggtgatgatggctttgtaatataatttgaagtcaagaaatgtgatgctcccagctttgtttatttgcttcagaaaggctgagtcaacagctgcagagatgaagctgcccctcctcgcagggctccttcccggaaaaagatcatggctcccactgaccatataaccatggctggaactcctgaaattcccaaagggaggccctacccagtgaggggggatgaatgaaggtcctacttaaggaatctgtctggccacaatcaggcacagcagctgtgctgccttgtgggggaccagaccacctggattccctggagcctgcaggctagaatgtctgagtccatggaaacacagaaatggaggccgccctcacctccccagaaaactgtagtctcaggcagtctccagccgattgccactggttggctgctattccaagccagtgggtcttaacttgagaggtgctgtggaagtggggcccacggaatgaggctgcttggctccctggattcagccccttttctaagggaatgtacagatggaactcccgccttgcccagctttccaagtatataaaactcctgagtctctgtgagtgtctgagcgagtgctctggcaacattcgacacggctctgtgtatctgacccaagacccttatggcatgagctaatgggaggatcttctgatccatgcgtggcaaagatgcatgggagaaacatggtttgtgggtaggggttgtgcattcactactgcttctcttggctgtaggtgaaggtttctttggctctgtgctgatactgggtgcaccatcacccaccccctttgtttcttctcctgggtcaagtcatttgcctaatcagtcccaatgtaggaacctggatacttcagttcaaggtgctgaattcaccgtgcttttcattcaggggaagacagctgcttctcattgggcatcttggcctgcccacttcacgtcactttttgtaaaatccacaccactccaggaatatccattacttaacttcgcctgaaataaacagaaggctcattacacttatcatgggctcacttacttcgcctataatgaaggtgccatggaaatgctagtggatgacgtggtccattttcttagggatgagatagaaaaatggtgtatggctttttaatttaattaaaatttttagtttggtttaaatttacattggtctctttttggttttgttgcctgtacttttgaagtcttactcgtgaactctttactggacaatgaccagaagagttttccctaagtttcttctgatattttgaccatttcagtacatacatttcagtctataattcactttaaattgatttttgtaaacatggtaagaaataggagttcagatttattcttccgcatatgataatgcaactgtcccagtaccaattattgaaaagggtgtgctttccctagtgtatattcttgtcagctttgtcaaagatcagttgcctatgaatgtgtggctttcattttggattctctcgtctgttacatcaatctgtgtgtccacatttatacctgtaccatgctgtattggtgactatggctgtgtaatatattttagagttaggaaatgtgatgctcccagctttgttcatttgcttcagctgaaaaggttgagtccacaattacaaagatggcagccgcccatccccggaggacctccaacccagaaagagatcaggcttcccaccaaccctataaccctggctggagttcctgaaattccaacagggaggaccttcccagtgaggagggatgaatcaaggtcaaatttaaagaaacagtctggccactatcaggcacagcagcagtgctgccttgtgggggacccctcctgctccagaccagctgccctccctggagcccgaaggctagattgtctgagtctacggaaacagagacggtggccgccccaaccacccagaactcggtagtctcaggcacttggcttgctatcttgccactgcttggctggtattccaagcccgtgggacttgagaagtgctgtgatgatggggaccacaggatgaggctgtctggctccctgtgatatggctgtgatgagtggaggaacaccagggctcatgtctcacacagaattggagaaaatgacacaaacacatgtacagtggttttatggcgtgcagtttaataggcaagaacgaaggaagagctccccatactgagacagagggaggggggctccaaagccaaaagaggaaacccggagtgctgtggataccaatgagttatatgaagaaactggagggggcggtgtctgatttgcatagggttcaggcgattggttcgaccaggcatgtcatttatgtggcccacggaaaaactggccctcccacctagcctttgaatatgcacgtgccggacaccctgatttcctacactcatggggatatatgggggtggccatatcgccaggcacaggtggggacaagggccagaagagggcgggaatcgctatgtttgggtggacccagtttctaatggccggcatctgcagatcaaggttaccggagaactctaaaagccggggctttcctgctagacaagactcatttctggagctgctttaaaaagaaacaaaacttcccaaggaccccttttcctccctgtctgcccaaaataatttcttaacaactcgtataacacctgaattcagcccccttactgggggaatgtaccaacggaactcccacctttcctggtttctcaaggctagattgtgtaaacctcctgggtctcggtctgtgtctgagcagctgctctgccaacactccacacagccctgtgtactaggcccaaggccgccgtgactcagcccatgggaggatctcctgatttcttggttgcaaagatccatgggagaaaaatggtttctggggcggggtcacacactcatggcttctcttggctgtgcaagaaggttcctttggctctgttccaatatagcgtggttcatcacccacccctgttttctttgttctcctgagtcaagttgtttgcctagtcagtcccaatgtgagaacctgaatatttcagttcacgtgcttatcgtgaaattcactgagactttaattcagtggaaggcagcctcttctaattggccatcttggcccgccccctccacgtcacctcccataaaatggccacgctctccagggacgatgccattatatatctttacgtgaaaccgacagaacacttattacactttttgtgagctcatttacttcacttataatgaacatggccatggaaatgctagtggagaaagtggtcgattttctgatggatgtgataaaaaaatggtttgccgaccaattaatgacatatgtctcaaaactagtaacgagacccttaatcgctgggttgaagtttctaatcaagaagatgctcatctatgtattcaacaaagcagcttcccttgcttctgaaatgcttccaaacaacatctcatatttcctgaagaagataatgcctggacaagcagcacaagtcattcaggtttactttcagctcataaatccagcaggatattcgcacaattgttgggaaaccttatcagttcatgagtcgtgcatgtttcctttaatttcaggaggaagagggtaatctggaagagtttcctgacctactctgctgctgtgattaaacaaccaccaggaaattttgatgacactgttctcctgagctcctccctttcctcggggaagaaaagcattgaaactacaaaaataaagtgttatttggctggagtgaggtctcatgtctgcttatgcggtggctcgctgctcagaacagggtgagtctctgagttgtacgctgaggaggggaggctgtcaatctagaaaaaacccattgcatgggacacctccatggggtctggggggctgaggatgaggagctggactggatctagggaaggaggaggtttcagagggtgaaattctggcagtaaatcctgggggtgtttgaaaacttcctccctcagaaggagaagactcagggaggaataaggacaaaccatgggtcccttgaggggcatttactaacttaagaggactttatcgggaagcagagtgacaatggcctccttgaggactgaggcccctggataaatgaggcccagatccagatccagtccatgggagatgagaccttcaagggacatatttttgttgggacagaggaaaagtgcagctctgcagctgcagaggaagccttggcagtgtgaaagcgaccttggagggggccctgtgcgttctgaatgcttctgaggtccatcccctgtccccgcctctttttctggattttttgggctccatggtctccgccatcttctgagcgctccacgctgccaccttcagttttctcttctgggctccaaatactccaaaatctttcatatctgtgcccctacccctgtttttagcatgtgttgggactccaggtccctgaaggtttctggcctgaaatccacctccccagcggtgtggattctgctctagagaccccgcacttggcaaggttcccaggcccctgggggacaaccgagtggtatgtgcacttcagggctccacactcggcaaggtctttcaagcccttggggttccctcctcagttttcttcacatgtctgggatgtagtcactctataaatgccgggatgtgatccccaccccagtgattttttttagttccatgagtgttgctatctgaatagtcatcctgagagtgatgggaccttttgaatttgcagcaagttttagattagtgtgagtggcctgagatcgcaaaactggggctagcattggatgtgaggttaggctggtggaaaaatttgcccagaacctgaggagtgtgggctcactgcaggtggttaggatcagcacagaattgcaaggatgtatagctttggggtaaagaataacatggttcagaagtacatgtattagtcttttcatgcattgctataaagaattacctgagactgggtaattaattataaaaactcaggtttaattggctcatggttccacaggctgtacaaaaaggatgatgctggccatcagctcaacttctggggaggcgtcagaaaacttagagtcatggcaaaaagcacaagggaatcaggctcatcctccatggccagagctggagctagtggtaggagaggtgctgcacacttttgaacaatcagatctttttagaactctatcaccagacagcacctagaggatggtgctaaattattcatgaaatatccacccatatgatccactcaattctcaccggcccaaccaggaccacctccaccattggggattacaattacacatgagatgtgggtggggacacagatccaaactcgatcagtgggcatcttggactgggtctactatagaagaagaaccaggagctgactatcatccttaagactgcccatgatggccaggcagggtggctcatgcctgtaatcccagcactttgggaagccaaggtgggtgaatcccctgaggtcaggagtttgagaccagcctcgccaacatggtgaaaccctgcctctactaaaaacacaaaaaattagatgggtgttgtgccagacgcctgtaatcacagctactccagaggctgaggcatgagaattgcttgaacctgggaggcggaggtggcggtgagccccaatcgcactgctacactccagcatgggcaacaataccaaaacatcgtctcaaaaaaaaaaaaaaaaaaaaaaaaggctgcccatgaccactgccccagtgagagggacaccagcatggctaagatcaagtgctggacattcttcatgggtcagacattaaagcaggccacactgttacagagatgggctccattcatagcaacaaagtggtgagaagatgtgggaatggcagaggccagcactttgccatcaatgcaaggtgggcataaggagctggcaccagtgccagagtgcatcaggggaggactgctttgcaatatctagcacttacctcttagagtatgtttcattagggacaacagatataaatggcagacaagtgagtcccttcagtaacaggaaatagaaatcatcaagaggaacagaaacagatgtcagcagccctcatataaagtcatcatccttcatccagttaaaacctgagacagttctcacataagaaggtctaattcaaaaagagactgggttctcatgaggcaggttcatgcaaaaccaagggaagtatacaactttgggattctccagcttcccttggaaaagacctacaatcatttgcttaggtaactgagcactgaacaaaggtgagtattgttatctttcagaagctgttggccatgaaggtcttgctggcataaaacccatggttggaaacatcaccatgacccctgttagagtaatggcctaagggcaagggtcaggaaattgatgtattccttgccaacttctgcgagacgagtgttggtccactcatctctttcacggaattcaccagtctggtatcttcaaaatccagaaggatgatggcagatggcaggaaactaatgcaaacaccatcagttgtacctccactgtagcagcagtaatggatgttatctcttcattgtaatatccagggagggagaagatgacattattctcaatattctaaacaccctgtgtgtacagcctctgtgatattttttgtaatatccgtgtgggagagaattatattactcctaatatctcaggggttgtgccccctctgtgacaatgttcctaacacccaggaggggataggatgatatcacttttagcatcacagggggtgtacaccccactgtaatattgttcataatatccgggggggagagaatgatattactcccaatatcgcaaagactgtacaccaacctgtgatattatttgtaatatccataagaggaagaataatattactcccaatgtcacaggaagtgtacacccttctgtgatattgttcaaaagatccagttagggaggggatgatattactctcaatatcttaaacaccctgtaggtaagccctctgtgatattcctcataatatccagagggagaggatgatattactcccaatattgcatgaagtctacaccccacctgtgatattgttcctaatatccaggatgggagaggatgatattactcccaatgtcgcaggggatgtacaccttccctgtaatattgttcgtaatatctagaaaaggagaggataatattactttcaacatcgcagggggtgtacaccttccttgttatattgttgctaatatccagggaaaaagaagatgacattaccaccactattgcagaaggtgtacacccccccttgatatagttcctaatatccagaaaaggagaggagatattactccaaatattgcaagaggtgtacattcccctgtaatatttttcctaacattcaggaagaaagagagtgatattgcccttaatattgaagggagtgtgccccccccgtgatattgtttctaatatccaagaaatgaaaggatgatattactcccaatatcacaggggctgtacagccccctcccatgatattgttcccaacatcggggggggggtgaaatagtattattcccagtatcacaataggtgtacacacctgtcgtgatattgttcctaatacccatgggggaaaggacgatattattcttaatatctcagagggatgtacaccctccctgtgatattgttcctaatatccggggtgggagaggatgatattacccccaaaatctcaaagggtgtacacccctcttgtgatattgttcctaatatccagggtggagaggataatattattcccaatatccaggaaaggaaacgatgatgttactgtgaatattccagggggtgtcctcccctctgtgatattgttcctaatatccaggttggggagattatgatatttctccaaatatcacaaggggtgtacaccaaccctgtgttattgttcctaatatcgatggggggagaggacgatattactcccaatatcacagggggtgtacaccacctttatgatattgttcctaatatccatgaagaaagaggatgatattactttcaatatcgcaggggatgtacactccccctgtgatattgttagtaatacctaggagaagaaagtgtgatattactcccaatatcgcaggggatgtacacgcttcctgtgatattgttcctaatatttagggggaaaggggatgatattactcccaatatcgaatggtgtgtacacccccccgtgattctttttttttttttttttttttttttgagatggagtcttgctctgccgcccagactggcgtgcaatggcgcaatctcggctcactgcaacatttgcctcccaggttcgcacgattctcctgcctcagccttcggagtagctgggattataggcagctgtcaccataccaggctaatttttgtatttttagtagagttggggtttcaccatgttggtcaggctggtcttgaattcctgacctcaaataatccacccaccttggcctcccaaagtcctgggattacaggcataactttccctgtgatattcttcctaatattcaggaagaaagaggatgatattgctcccaatatcgcagagagtgtgcactcctcctgtgatatggttcttaatattcagaggaggagaggatgatattactttctatattgcagaaggtgtacacctccctcgtgatgtctttcctaatatccagtgggggagaggttattagtctcaaaatcacagaaggtgtaaacccccatttgatattgttcctaatattcaggggtggggagagaaaggtattactcctagtatttcagggcatgaacacccccaccgtgatatcattcctaatatccagaaggggaggcaatgatatttctcctaatatcacaaagggtgtacaccccttctgtgatattgtaaatattctgtgtgtacacccccctgtgttatagtctgtaatatccgggtgggggagagggtgatatttctccccatattgtaggggatgtacacccttctgtgatatggttcgttatatccagggaagaaaaaggtaatattgctgcccatattgtggagagtgtacacccccatgtaatatggttcgtaatatccaggagtggagagggtgatactgctccttacatcgaggaaggtgtacaccttattgttatatgattcgcaatatccaggggaggagagagtgatattgctccccatgtcgcagggggtgtaaaccctccgtgatatgattggtaatatccaggaaaggaaagggtgatatttctccccatatcgcgggggacgtacatcctcctgtgatatggttcgtaatatccaggaggaaagaggaaaatattgctcttcataacccgaggggtgtacaacccctgtgatatggttcgtaatacccagaagtgtacacccctctgtgatatggtttgtaatatccagggggttagagggtgatattgctccccatatcgcagtgggggtacacccccctggattggttcataatattcatggggggagaaatttacatttatcctcatatcagggggggtgtacaccccccgtgatatggttcgtaatatccaggggaagaaagggtgatattgctccttatatcgcggaaggatcaccctcccctgtgatatggttcataatacccagacgggaagagggtgatattgttcttcataaagcgaagggtgtacagccccctgtgatatggttcataatatgcaaaaggggagagggtgatattgctccccatatcacggagggtgtactcccttctttgatatggttcgtaatatccaggggtgtagatggtgatatagctcgccctattggggagggtgttcacccctctgtgatattgttcgtaatgtccagggaaagagaggatgatattactcccaatatcgcagaaggtttacaccactctgtgatattgttcataatatccagggaaggagaagacgatattactcccaatatggcagggggtgtagaactcctgtgatattgtttgtaatatccaggcaaggagaggatattactctcaatatcgcagaaggtttacacccctatgtgatactgttcatgatatccagggaaaaagaggatattactccctatatcacaaagggtgtacacccctttgtgatattttttgtaatatccaggggagagaggataatattactctcaatatcagaaggggtgaaaaccctcctgtgtcattgttcataatatttagggaaggagagagtgatattactccaaatatcacagtgggtgtacacccccctatgatattgttcctaatttccagaaggggagatatgatattattgccaatatcgcagaaggtgtacaccttactctgacattgtttgtaatatccagatggggaaatgatgatattactcctaatatcacagggggtgtacacccccttgttttattgtttgtaatattcaggggaagagacgattatattactcccaatatcgcagggtgtgtacaacactctatgatattgttcataatatccaggggaggagaggaagtgtacacccccccgtgatattgttcgtaatatccagaggtagagaggatgatattactcccaatattgcaggtggtgtacacctttctgtgatattgtcatgatattaagaaggggagaggatgatattactaacaatatcacaaaaactgtacactccctgtgatattgttcataatatccagaagaagggaggatgatattattctgaatctcgcagaagatatacaccaccctgtgatatggttcataatatcctaggggaaagaggatgacataactgtcaatatcgcagggggtgtacaattccctgtgatattgttcacaatattcagagggaaaaaggataatattactttcaatatcgcaggcggtgtacacattactgtgttattgtttataatatccggaatgagagaaaattttctcccaatatcacaggaggtgtacactcccctgtgatattgttcgtaatatccagggaggggagaggatactattactcccaacatctcagggagtgtaggccccccctttgatattgttcctaatattcggaagtggagaagatgatattacttccaaaatcgcagggggtgtacactccctctgtaatattgtttctaatattcatgagtggaaagaaagatattactcccagtattgcaggggacatacaccacactgtgatcttgttcacaatattcgggggggagaggatgatattactcccaatatcaaagtaggtgtacacccccttctgatattgatcgtaatatccagaattaaagatgataacgttactcccaatattgcagggggtgtacatttttgaatactgttcataatattaagagggggaggggatgatatctgtcccaatatcgcaaagtgtgtacacctcctgtgacattgtcccaaatatccagaggaaaaaaggatgttattactcttaatatctcagagagtgtacacctccctgtgatattgtttgtaacatccagaagaaagaggctgatattactcttaatatcgcagggggtgtacacccccgccccgggatattattcgtaatatccagggggaagtggaatgttcagaatgggagaggatgatattacttgcaatatcatagtgggtgtacaccccactgtgatattgtttgtaatatccgggaaaggagaaaatgacattcctccccatatggcaggggctgtacaccacctatcatattgttcaaaatatccagaaggggagaggatatgtctccaagtatcacagggggtgtacaccccgctgtaatattcttcctaatatccagggtgtgagaggataatagtactcccaatatcccagggcatgtacaccccccttgtgatgttgttcctaaaattcatggggagaaagaatattactcccaatatcacagggggtgtacatacactctgtaatattgttgccaatatgcagcaggagagaggatgatattactcccaatatcacaggggctgtacaccccgctgggatattgtttctaatatcaagggggaaaaaggatgatattactcccaatgtcgcagggtgtgtacttcctctttgtgacattgttcctaatatccaggagagaagagggtgacattccttccaaaactgaaaggggtgtacacaccctttgagatattgtctttaatatccagaacgaaacaggatgatataactcctaatactgcaggggggtacaccctctctgtgatactgtttctaatatccaggaggggaaagaaaaatattaatcccaatatcacagggggtgtacattccccctttaatattgttcctaatatccaggaagacacaggatgatactatttccagcagcacagggcatgtacacccctttgtgatattgttcctaatatccaggaaaagagaggatgatattactgtcaatattgcagggcgtatacactggttctgtgatattgtttctaatatccgggggtggagaaaatgatattactcccaatattccagcgggtgtacacccgttctatgatattgttcctaatatctgggggagagagaatgatattattgtcaatatcacaggggatgtacagattccctgtgatattgtttctaatattcacagggggagaagggtataatactcccgatatcgcagggggtgtacactccccctgtgaagttgttcctaatatccagggattgagagaatgatattactcccaatatcacaggcggtgtaaaccccctgtgtgatattgttcctaacatccagaggaaaagatgatgatattattttcaatatcacagggggtgtacgcatccctgtgatattgtttctaatatccaggggaggagaggatgatattattgttaatatcgcagggggtgtaccccaccctgtgatactgttcctaatatccggggtggaagaggataatattgctcccaatatcgcaaagggtgtacaaccttcctgagatattggtcctaatatccagggagggagaggatgatattactttcaatatcacagggagtttacacaacccctgcgatattgttcctaatatccagcggaagaagagttaggataatactattttcaaaattgctgggtctgtaccccctccccgtgatattgtttctaatatccaggaggggagaaagtaatatgactcccaatatcttagaagatgtacaccctccccataatattatttcttacatccagggggtagaggatgattttgctttcaatatcacagagggagtaaacctttccggtgatattgtttttaatatttaaaaagagagaagataaaattactcccaatacaaaggggatgtattgtgtactcccccctctgatattcttttttaatatccagatggagagaggatgatattactttcaatattgcatgggatgtataaatcccctgtgttattgttctgaatatacaggtggggagagtatgatattactccaaatatcgcagggggttctttccccctgtgatattgttcctaacattcagggagggagaggatgatattactcttaatattgcagggggtgtacccacgcctatgatattgttcctaatatccagagggggagaggatgatctaactcagaatatgacaaggggtgtacacacagcctgtgatatggttcctaatatacaggggagaaggggataatatttctcccaatatcgcagggggtgtacaaccccctgtgatactgttcctaatatacagaaggggacagcatgatattgttcctaatatcgcaggaggtgtacaacgccctgtgatattgttcctaatatccagggcgggagaggatgatattaccctcaatatcgcagggggtgtgcactttccctgttatattgttcctatgatccgggtggggggaaatgacattagtcccaatatcgcaggatgtgtgcaccgctcccccgtgatattgttcctaatatcaagggggagagaggaggatattactcccaatatcgcaagggatgtacatcctccatgcgatattgttcgtaatattcaggaggagagaggatgatattactcttaatatcgcagaaagtggacacccaccctgtgatgttcttcataatatccagggaagcagacgattatatgactttcaatatcgctgggagtgtacatcccttttgggatattgtttctaatatccaggaagggagaggattatattactctcagtattgcaggcagtgtacaccttttttgtgatattgttcctaatattcagaaagggaaaggatgatattactcccaatattgcaggtggtgtatatccccctctgatattgttccttatatcaaggaagagaaagaataatattactcccaatatcaaagacagtgtagacccctcctgtgatattgtatttaatatccatggggaaagaggatgatgttactcccaatatcgcagggggtttacacccacactgtgatattattcctaaaatccagtggaggagaaaataatattgctcccaatattgcagggtgtatacaggccctcccccgttatattgctcctaatatccagcggtggagaggatattactttcaatttgtgtagggagtgtatacccccctgtgatatttttctaatatcaaggatgggaaaggatgacattactcccaatatcgcaggaggtgtacacgccctgtgatattgttcctaatatctagggaaggagaggatgatattactttcaatattgcaggagctgtacaccctctgtggtattgttcttaatatttaggttgggagaaaatgatatgagtccaaatatcgcagaaggcatacacacttccaataacattgttcttaatatccgggggagagggtgatattactcccaaaatctctggggggtgtacacccccttctgatatttttcctaatatccagggaaggaaacgatgatattactataaatattccaaggagtgtacaccttcctaatatcctaatattgttcctaatatccaggggtgggagaggattatattactcccgatatcgcagtgggtgtacacccctcctgtgatattgtttctaatatccaagctaggagaaaatgatatcactctcaataccacagggggtgtacaccttccgcatcatattgttcctaatattcagagggaaagaagatgaagttactttcaatatcggaggggttgtacacaacccctgtgatattgctgctagtatccaggaagaaaggggattatgttactccccttatagcagggggtatacacctcccctgtaatattgttcctaatatcaaggctgggatatacgtggggggaaggatgatattactcccaatatcgcaggggttatacaaccttctgtgatattgctcctagtaaccagggcagaagaagatgatattactcctaatatcgcaggaggtgtacactcccccattatgttgttcccaatatgcagaaaaggagaggatgacattattgccagtatcgcagggtgtgtacaccacccctgtaatattgttccaaatatttagggggagagaggatgatattactcccaacatcgcagggggtgtacacacatcccctgtaatatagttcttaaaatctaggggaaaaggggatcttatttctctaaatattgcagagggtgtacactccccggtgatattgttcctaatagccgggagggagataattaaattactttcaatatctcagagagtgtacatcgcccttgcgatattgttcctaatatccagagcaaaagagaatgatattactcccaatatcttaggagtgtacatttaacctgtaatattgttcctaatatccagggggaagagaatagtattactgccaatatcgtaggggttgtacaccttttctgtgatattgttgcaaatatttagtagagggaaagaatattactcgcaatatcacagggaatgtatacttcccctgtgatattgttctgatatccagaaaaagagagggtaatattactcccaatattgcagggggtgtacaccccccttgtgatattgatcctaatataaaggaaggaagaggatattactcctcatatagaaggggttgtccaccccccttgtgatattattcctaatattcagggaagcagaggatgatattattttcaatatcacagagggtgtgcagtccacctgtgatattgttcttaatattcggggggagaggatgttattatgcctgatatcgcagtagaggtacacccctcaagtgatactgttcctaataaccaggggtgaagaggatgatattactcccaatatcgcaggtggtgtacacccccccatgatggtttctaatatacagagggggagaggaaaatattactcccaaaatcgctggaggtctacaccccccttgtgatattgttcctaatatccaggaaaggaaacgatgatattactgtgaatattccagggggtgtacacccgctttgtaatattgttcctcatatccagggtgtggagaggattatattactcccagtatcgcagggggtgcacgacgcccctgtgatattgtttttcatatccaggaggggagattattatcaatatggcaaggggtgaacaccccctgtgatattgtacttaatagttaggttggcagaaaatgatattagtctcgatatcgcagggggtgtgcactccgcctggtgatattgcttttaatatcaagggggagaaaatggcattactcccaatatcgcagggggtgtacaccgctcatgtgatattgttcctaatatccaggtggagagaacataatattactcccaatatcgcacaaggtgtacacccctcctgtgatatggttcctaatatccatgggaggagatgatgatattactcccaatatcacaggggatgtacaccacccttgtgatattgttcctaatatccagggaagaaaacgatgatattattgtgaatattacagggagtgtacacactccctgtgatattgtttttgatatacagggtgggagaggatgatattactcccaatatcacataaggtgtacaccccccgtgatattgttctaaatatttcggtggggagaaaatgatattagtctccatatcacagggggtgtgtgctcctcaggtgatattgtttttaatatcaagagggggaggagattatattactttcattatcacagggggtgtacacccctcctgtgatattgttccttatatccaggcgaggggaaaataatattactctcaatatcgcaggaggtgtacacaccccatgtgatattgttcctaatattaagggggaaagaagataatattactttcaatatcacagggtttgtactcctttcttgtgatatagtttttagtatccagggggaaagagcatgatattactcccattgtagcaaggggtgtacacacctcctgtgatattgttcctaatatccagaagtggtgaggatgatattactcccaatatcgcagggggtatacaccccacctatgatattatttctaatatccatgggaaaagagtatgatattacacccaatgtcgcagagggtgtgtatttttcctgtgatattgtttctaatattcaggcggggagaagatgatattactctcaatatagcagaaattgtacatccccgctgtgatattcttcataataatcagggaaaaagaggatgatattactaccaatattgcaggggggttacacttcccctatggtagtgttcctaatatccaggaagaaagaggatgatattaatcccattatccaggaagtgtacacccaccctgtcatgttgttcctaatatccagcagggaagaggatgatattacaccccccccccgtgatattctccttaatatccaggaggggagaggctgatattactggatatatagcaggggtgttcataccttctgtgatattgttcctaatatccagaaaaggagaggatgatattacttccaatatcgcagaaggtgtacacctccctgtgatattgatcctgacattcagaaggggagaggatgatattactcaaaataccgcagggcatgtgcattcccttgtgatattgttcctaatacccagaagggaacaggataatattactttcaatatcgcagggagtgcacacccccctttggtatggttcttaatatccagaaggaaagagggtgctattactttccatattgcaaggggtgtacaccccactgtggtatggttcataatatccaggcagggagagggtgctattactccccacagtgcggggcatgtacaccctgctgcggtacggttcctaatatccagggggagagaggatgctatgactccctatatcgcggggtgtgtacacccctgtgtggtatgttttgtattctccaggaacggagagggtgttgttacccctcatatcgctggaaatgtacactcccctgtggtatggttcgtaatatccaggggattgagggtactgttacccccatactccccatatcgtggggggagtgcacctccctgtggtatggttcgaaatatccagggtaagagagggtgctattattccccattttgcaggaggcgtacacccccctatggtatggttcgtaatatccggggtgaggggatgctatcaaaagaagagagaaagagaccccccatattgttctatattattttatactcagtacctgttttaagaagaaacaaggaagtgaaaccaaaagcaggcagcccggcgccaggcaccagacccaaaaccagacccgaaaccaggcctgggcctgcctgaccttagcctgatagttaaaattcaacccatgacctagcaaccaatgttatccatagattccagacattgtatggaaggacattgtgaaatttcttgttctgtgctgtttcactctgattaccggtgcctgcagcccctgtcacatacccactagattgctcaatcaatcatggccctttcatgtaagatctttagtgttgtgagcccttaaaaaggacagaaattgtgcactcaacaagctcggattttgagacgctagtctttcgatgcttccagctgattaaaagccacttccttcactacctcggtgtctgtggggttttgtccgcgactcctcctgctacactatgactccccatatcaaggggggtgtacacccccctgtggttcgtaatatccagcaggggaaaaggtgctattactccccatattgcagggagtgtacacccccttgtagtatggatcgtaaaatcaaggggggagggaaggtgtaattatccccatatctcagggggtgtacacccctttgtggtaaagtttgtaatatccagggatattacagggatattatccccaaattaatacttttataatttcttatgcctgcctttactgcaatctctgaacataaattgtgaagatttcatggacatttatcacttccccaatcaatacttttataatttcctatgcctgtctttactttaatctcttaatctcatcatctttgtgagctgaggatgtatgtcgcctcaggaccctgtgatgattgcattaactccacaaattgtttataaaacatgtgtatttgaacaatatgaaatctgggcaccctgaaaaagaacaggataagagcgatgttcagcgaacaagggagataagcataaggtctgactgcctgtggggctgggcagaacagagtcacatttttcttattgcagaaaatgagtaggagaaatatcactgggaagggaacgcattcctaggggaggcctatggacggccgctctgggggtgtatcccttatgtggttgaagataagggatgaaatacaccctggtcccctgcagtgccctcaggcttgctaggattagaaattccagcctggcgaattctagtcagaccagttctctgctcttgaaccccgtttcctgttaagatgtttatcaatgacaatgcgtgcacagcaggacatggaacctcaatagtaattccattttctccctggccttgtgaccttgctaggcccttctgcccttgtgatcttttattgccatttgaagcatgtgatctctgtgacccactccctattcgtatccccctccccttttgaagtccctaataaaaacttgctggttttgcagatcaggtggtcatcacagaacctgccgatatgtgatgtcaccccggaggctcagctgtaaaatttctctttcgtactctttcactttatttctcagaccaggtgacacttaaggaaaatagaaaagaacctactttgaaatattgggggctagttcccccaatagacattgttcctaatatccagaaaaaaagaagatgatattactcccaatatcacaggggttgtgaaccccacctgtgatatggttcctaatatccaggaagggagagaatgatattactctccatattgcagggggtgtgcacatccctgtgatattgttcctaatatccaggggaggagagggtgatattactcccaatattgcaagggttgtaaactccaccctgtaatattgctcctaatatttaggatttagggggggagaggataatattactcccaatatcgcaggggatgtatatgccctctttgatattgttcctaatatccagggggggagaggataatattactttccatatcacaaagagtgttcacccccctgtgatattgttcctaatatccaaaaaggaagaggatgatatcaatcccaatatcacaggaagtgtacaccccccccttttatattgtttctaatatccaggggaaatgagggtgatatttctctcaatatagcagaatgggtacactccccctgggatattattcctaatatccaggggaaaaaaagaggttgatattcttcccagtatagcagggaatgaatacaccctttgtgatattgcttctaatatcaaggggaaaagaggatgatatgactcccaatatcacaggggatgtaaacctgtggcgttgttgctaatatcaaggagggaagagtatgatattactcctaatgtcgccgaaggtgcacactttccctgtgatattgttcctaatatccaaaagggaagagaatgatattacccccagtattgcagggtgtacaccacccctgtgatattgctcctaatacccaggaaaaaagagaatgctattacccccaatatctaaggggacgtataccttccctgtgatattgtttctaatatccaagtggggagaggatggttttactctcaatattgcagggagtgtacactccccctgtgatactgtttctaatactcgggctgggagaaatagtattactcccaatatcgcagtgatattgtttccctgtgatattgtttctaatatctagtgggggagataattatattactaccccatacacaggggagggtgtacattcccctgtgatattgtttgtaatatccagggaaggagaggatgttactcccaatatcacaggggttgtacaccccttttttgatattgttcctaatatctggggggcagagaattatattactgtcaatatcacagagtgtgtacaccccctctgttatattactctttatattcagggcggtagaggatgatattactccctatatcacagggggtgttcacccctcctgtgatattgtttataatatctaaggggaaagaggatgatatcactctcaatatcaaaggaaatgtacacctttcctgtgatattgtttttattatataggggggcagaggatgatattaagaacaataccacaggggatgtacacccacgtattgatattgtccctaatatgtatggggaaagaggacagtgtaactcccgatatcgcagagtgtgtacacccccttgtgatattgtttctgatatacacggggagaaaagataatatttcttccaaaattgcagggggtgtacaaccccctgtgatattgtttttaatatccagtgggggagagaatattactcccaatattgcagggcgtgtacacaacccctgtgatattgttcctaatatccagagtaggggaggatgacattactttcaatatcgcaaggggtgtacattcccctgtgatattgctcctaatatccatgaggggagaggatgatattattcctaatatggcaggggctgtacaccttccctgtgatattgtttctaacatccagtgggggagaaaatgatattactccctatatcacagaaggtgtacactttccctgtgatattgttcctaatatccagaaggggagaggataatattactcccaatatcgcaggaagcttacaactcccctgtgatattgtttctaatatccagggaggtagggatgatattactcccaatatcgcaggggatgtacactcccccgtgacattgtttctaataaccagggggtgagaggatgatattacgcttaataccgaagggggtgtacacacccttgtgatattgtgcctaatagccagggggaagaaaattatattaattttaatatttatggggaaaaaggatgatattactcccaatatcacaggggctgtacaccgaccttttgatattgtttttaatatccagaagagaagaggataatattgctcccaatatcagaaaaggtgtaaaccccttctgtgatattggtcctaatatccagggagggagagaataatattactaccaatatcacagaaggtgcccacccccaaggtgatattgctcctaatatccaaagataatagggtgatgttactcccaatatcacaggaggtgttcacaccccttgtgatattgtttctaacgtacagggaagggagaggatgatattattcccaatatcacaggaggtgtatactcctctgtgatattgattttaatattcggggggaaaggatgatattactccctatatcgcagagggtgtacaccctctgtaatattgatcctaatatccagggcgggataggatgatattactcccaatatcgcagaaagtctacacaacccccagtaatattgtttttactatccagggggaagaggatgacattactcccaatttcacagagtgtgtacactcaccatttgatattgtttctaatatctagggggagagaatatattactcccaatatcacaggaattgtacaccacctctgtgacattcttgtgaatatccggggaaaaagagaataatattactcccaatattgcagagcgtgtacacccctccatgatatcgatactaatatttttttaaagaggatgatattactcccattgtcacaggatgtgtacaccccccttgtgaaattgttcataatattctggggggagagcataatattactccccatatcgaaaaaggtgtccaccctccttataatatggttcctaatatccaggatattacttaatccaggatacttgtaataccctaaatatacaattgcttgaacctccacctcccaggttcaagcaattcttctgcctcagcctcccgagtagctgggactacaggggcacaccaccacacccagctaatttttttttcttgtatttttagtagagatggggttttgccatattggccaggctggtctcaaactcctgaccttgtgatctgcccacctcagcctcccaaagtgctgggattataggcgtgacccaccgtgccaagccaggaagaggatgctctatagatttccccaataagagatggctttgcagggccattccaaaatatgtcaaagaaatacatttggggataaaatactttgatttcctttagggaatgttatctattatgtgatgctataccagagtcaggttggagtcggttatcttattgcaacaaagagtctgttccgtcactgttgggatctctattttttcctcttatttcttgagacagggtctcactctgtcacccagtctggagtgcagtggtgcgatcttcattcactgaaacctctgcctcctgtgttcaggtgattctcgtgcctcagccccttaagtaactaggattacaggtgtgcgccaccacacccagctaatttttgtattttcagtagagatggtattttgccctgttggccaggctggtcttgaactcctggcctcgtgtcatctgcccacctcgacctcccaaagtgctgggactgcaaatgtgagctattgtgcccagccaggatctctgttttaatgttagtgctggtcactttgcatgaactccaaagggaagaaatataatgaggtgtgtctgaccccctgccttctcatcgtgacctgaattagtttttcaggtttgcaggggatacccttggacaagaaggggctctattcggttggttggggggattagaattttactttttgtttacaatatttctcctgaaagagttaggggctcacaaggaatttccgcgtgagcaacttatgaggaaagccatctgggaagatatgtgtccttgtgtcactgggatattctcgtttaccccaatgatacggcaatgacgcagggttgtgaaattacagctatgtgtttggggaaaaaagaaagcaggattgtgtgactacgtttccaaacttcacttgcccttagccatagtgagttgggggcctggagattctgttttctttcacaatgatatagatacaattaaatgtatagaaagcaaaaaaataaaaaggtgagtaatgaggaacctctgattcctgagtggccatgtagttacccatggcacagagccacagttactgaaggtaaagtttgctggggaatttagaaatgaatccagctcttggaggagtcagtttactggatgcctaagaaaatgcaaacaaaataagaaaaaagggtaatattcaatcccatagttattgttacctgtcatagctaaagtaaaattaaaacagagtgctggcttcaatcttgatgctacactaagcttagatttcagtgaatgtgagtctcagccactagctcagagccacctcccaaagaccaaatcatgtagggacaatagaaagtacttctgagaattgtggttaccaagaacctagtaactgttggggaggagcaaaacaaagtacagaaaccagagggtacaatctgagtgagactgctatcagcttctggaggagcctttactaaaatgaatgatgagagtaactggatgatgagagtaactaatggatgatgagagtaagcaatgtctttggttttcttttttttttttttttttttttagcagacgtctcactcttgtcgcccaggctggagtgtaatggcatgatctcgcctcactgcaacctccacctcctgggttcaagcaattctcctgtctcagcctcccgagtagctgggactacaggcactcatcaccacacctggctaatttttgtatttttagtattttctggtgagggtccaggtttccggaaacaactcagagacatatgttaagatgttatctttagttttcacagggaaccaaatatgttacgactccaatttccttggctattgttttaagttaccattaccttctcgttgatcaagttgctcatttacttctcaagcctagctagatgcctggaatttcccttgaaggaagtcaagattttcctttatctccatactggctgatggtgatcgagtaagcccctaagaggggtccctgctccatctcgagatgctgctagattctacagtgcctaataaacagctctcgcctggccgacaaagagctgcttgctctctggatagcaattccaaagtgaacagacaacatcctgtttggaagactgccactctgttagaagaagcatcaggaaaacctttcttttgagctatttataactaacagcaattgaccaagtatacttttgtgagtgaaactgacctttctccctgtaagaattctccaaaatttggaaactatttgtgagtatttttacttatggcaatataattattggcacaagctcaatcagattcggttttctttcgtaacaggaaccattggagatactcattactctttgaaggcttacagtggaatgaattcaaatacgacttatttgaggaattgaagttgactttatggagctgataagaatcttcttggagaaaaaaagactgggtatattttcaatatgctttccttttaaggtccctcacctgtggaaagtaaagaatgtcactttctgacaggctcaggaacctcaagttatgtagggatctcaagaagatgggggaattcacccagttcatacaggtgaaattgctgttgcaaagattatgaatatgagagaagtccagcatggctgacttcatctcgtgtctggcctcaggctggctgcccttgctcactcttgggcataggccaagctagccatgggaggaatttagtttatagtttaactttgaagcacggatgataatagtctctccctaaaatgaaccccttccttgctcagggactgaaactacctttgtatgacaaatgaaagcccacaagattaagattatgagaggggcctgaattctgctaaaatgcaggtgtagctgactgataacaagtcattgtcccacagcttgcctttctataatctcttgcttctcaggagtcacatggccagaggtcctgagatttccagtcctgtgacccccacccagagatggacttagtgcatgaggaccattttccacacccctatgatttcatcctcaaacaatcagcagcaaccattccctagccccctgccttccaaattatccataaaaatcctagcctctgagttattagggagattgattaataatcccagtcctaccccttgggttgctctgatttaattaaaccttctctactgcaataccacggactcagtaaattggttttgtctgtgcaatgggcaagaagaacatgttgcatggttatacaggtactacaagcacagtctgatggcaaattattggttttgcttcctgcccttgatgtttctaaacatctagtccaaaattacttgtgaaaggtccagcaaagccaattttaaaagaggctatatggccaatcactattctttctacacattattgcaaataatcaggccacggctgggcacggtggctcatgcctgcaatcccagcactttgggaggctgaggcaggatcacctgaaatcaggagttcaagaccagcctaggcaacatgataaaaccctgtctctactaaaaatacaaaattagccaggcatggtggcatgcacctgtaatcccagctacttgggagactgagggaggagaatcacttgaacctgggaggcagagattgcagtgagctgagatcacaccactgcactccagcctgggcaatagagtgagactttgtctcaaataataataataataatcagaccaagtataatgaaattaaaatttattttgcaaataaattggtcctactacaatttatccttcatagaaatgtggaaactgaagataaaaaaaattaggtttcagaagaaaactatactacacctgttattagattctagccctaaacattgtttttgaggtttttattatttacctgcaatttggtctaaattctgaattatttcctgactacaagtatccaaggaataaatgggttttctttttctttatgatagttttagttggcttctaatgcaacaacaatttttattgtaatcctgtgtgcattctattcctactattcaaattattaatgttatagatctttcattgtagtacttctgaattaaccaaaatcacagtattctgaagatgattctacaaagcctgctgtttctacaaaggctgctgatgatttctacaaagcctgctgtagtgttgctgtggcctctgcttaaaaaagtagaaaacacattgatgcagcatgttcaccccaacctccctgcctaaaggctcagggaccatcttggaagaggaaggcgcgtgagattgtaagagccgaattagggggatggagtgtggagaataaggacacttcatcttggatgctcacctgccaaattgacttctgatgaaagccagctccagaaatgtgcctacagttactactttcacctaaaccctgcccttagtcaaatccttctcttcttctaagcaatcaacttcaattccttgtataacccacagtataaaagggcttttataccattctatcctattgcatgtaagccttgggtctgggaggtaacagtgtgggattccaccatctcatctccctgccacccaaacatgcctgctcttctttaagcaatattaaatgtttgtacttcagaaatttgatttgtcagcctcttcttcagactctcagcttctttggcctttgggagtaaatttgcataggcctgctcaaaacaggatgttctgggggtttgggggtgttgttttgttttgttttttgttttgtttagagacagggtctcactctgtcacccaggttggagtgcagtggtgcaatcatggcacactgcagcctcaaactcctaggctcaagcaatccccccaccttggcctcccaaagttctgggattacaagcataagccaccatgcccagccctggacttttctttaaagacatttacacagtgtaggaattactgtgggtgcactgctcaggtccccttctccaggatgctcattcctacctcatagatgattttcctgcagagatttgacctcagctgaagggcagtcacctggtccaggtggttgctattcacctccttcctgagaacagccaacagccagggacacgctagcacagagatataagagcgaccaaggtgaggccccttctgtgctgcggtgcatgctccagagcctccctgggatcagacttaagagggtctccagccagatctggtcttcgctgctttcctcgagctccccagcgcactcctgcaatgcatcttttttttttttttttttttttttgagacggagtttcactcttgttgcccaggctggaatgcaatggcgcaatctcagctcaccacaacctctgcctcgcgggttcaagtgattctccttcctcagcctcccaagtacctgggattacaggcatgcaccaccacgcccagctaattttgtatttttagtagaaacgggtttctccatgttggtcaggctggtttcgaactcctgacctcagttgatcctcctgcctcagccttccaaagtgctgggattacaggtgtgagccactgtgcctggcccaatgcacctcttgaatcacctcctcatgctttgcttttagagaacatgatccccaacatgtgattccagcaaagattctagaaagccaaccgtgacaatcacttctgggtttagatgacccccccccaccacaagatggcagtgagcacctcatcacagaggtgctgatggtctgcagcaccgcgccaggccagaacgtgccttttacagaagaaaataacccagtagctgactaggatggtgaggagggctggtgagcactgcggtagtgagagggacactagcatcactgagatgcaagtgatggtcatttttcataggtcaaagctcaaagcaggggacagttacagggcagggcttcatagcaccagtgtgatgaaagtatctgggagtggctaaggccagcactatgccatgggaagcaaggtgggcctgaggaggaggcagcagcgtcagcctgcaacaagtgggggctgccctgcagagacctaagagtcatgttatagagcacagtgtctgtaaggccaagaagtgtggacagccaagtgtgtcaattactagacatactcaagaggagcaggaagggcagggcatggtggctcatgcctgtaatcccagctacttgggagactgaggaaggagaatcgcttgaacccgggaggtgaaaattgcaatgagccgagatttcgccactgcactccagcctgtgtgatgggagcgggactccatctcaaaacaaaaaaagaaaaaggaaaaagaaaaaaagaaaaacctaggtatacttctcaagcaaataaaaataatcaaaaccaatatcatgcccgggcacaaatttcatatatataacagatttaaatatatgagggtgattatcctctcatatctccatttttttttgtttttccatttttttctttactaaaaaaagttaatgccaatgacacacaatttttttttttttttttttttttgagatggagtctcacttcttcgccctggctggagtgcaatggcgtgatctcgactcactgcaaagtctgcctcctgggttcaagcaattctcctgcctcagcctcccaagtagctgggaccacaggagtgagccaccacacccagctaatttttgtatttttaatagagacggggtttcaccatattggccaggctggtctcaaactcctgatctcaaataatctgcccgcctcggcctcccaagattctgggattataggcgttgagccactgcgccccgcctatgtatgattttttttttaattttattttcataagtttttggggaacaggtggtattttgttacatgagtaatttctttagttgtgatttgtgagattttggttcacccatcaactgagaagtatacactgaacccaatttgtggtcttttatccctcacccccttcccaccctttcccccggagtccctgaagtccattgtatcattcttatgcctttgcatcttcatagcttagctcttgaacccttactttctgtttgagggagaagacatatcatctacaagtagatactgtgtaaacattccattgcatgactatcccataacttatttattatttgtgtttggttatttgctgctatgtaacaaccccactcccaactaaatggtgtgacaattccatgattctgtggatcaaaaattctgaaaagtcaaacccaaggagttttgtctctgctccatgatgctaaagcctccgcaggggtgaggcgaatggctcagggtgactgaaaagctcagggttggaacagctggggatgaggcctctatgtataagatgattcttcactcacaggtctgaaactatggtggggacagccagaaggctcggctcagctgggacagtcacctgagccctacacatgacctctccaacatggtgatcctgaagcagttgggtttcttacacagcatcacacttttcttttttttttttttttttgagatgaaatattgctctatcacccaggctggagtgcagtggcacgatctcagctcactgcagcctccgcctaccaggttcaagcgattctcctgctccagcctcccaagttgctgggattgcaggcgcctgccaccaagcccagctaatttttgtatttttagtagagacggggtttcaccttgttggccaggctagtcttgacctcttgacctcaggcgatccgcctgcctcggcctcccaaagtgctgggattacaggcatgagccaccgcgcccggccaaagctcacacttcttatgattcagccttagatgtcacatcagttcattttccccacacttattagtgttagaagtcacaagcccacccatactcaggggactggcacacagaccccactctcaatggaaggggtgggacaccaccattcctgctgatgggcatttgggtaacttcctgtttgaagctattaagattgggctgctgtggccgggcgcagtggctcacgcctctaatcccagcactttgggaggccgaggcgggcggatcacgaagtcaggagatcgagaccatcctggctaacacggtgaaaccccgtctttactaaaaataccaaaaaaaaaaaaaattagctgggcatggtagcgggcgcctgtagtcccagctactcgggaggctgaggcaggagaacggcgtgaacccgggaggcggagcttgcagtgagccgagattgtgccactgcactccagcctaggcgacagagcaagactccgtctccaaaaaaaaaaaaaaagattgggctgctgtgactattctagtaggtgtctttggtgagcgcctacacgtgtttctctttttctctttagtatatgcccaggaggggaactgctggctcccagataccgtatgttcagggtcacacacacttccacagggttttccaaagcccttgtaccagcacgcactcccagcacctgtgtgactgctccagctgtcccacagtctcatcagttctattgctgatattttcattttagcttaagttatatttaataggaaaattaccgttgcctctgccccccgttcctgcctgtaggagtttctcgtagctgttgctacaggtggccacaaatctgtcacttaaacccacacaaattgatgtccttatggctttggagtcagaagtgtcaactgaaggtactagcagggctgtactgacctggtggcctcagggagcatctgtgctgcttctccaccttctagaggctgctgcatccctcgctccagccccttcctgacaccactcaccctcctacttctgttatcacatcctcaccttctctgtgttcagggctccctctgtctctctcttgcaagcacacttgggattccattgagggccacccacataacccaggagaatttctccacctcaatatccttaacaactgcagagcccttttgccataaaagttaccattcacgggttccagggattgtgacatgggtagctttaggagtgattattcctgcctgtctcccgctcaccagaacttggactttctctctcaacaggagccccctgtgtgggaatagcctgtctcaacgacgccctctataaggacctgcttcctcaaaggacctcatagtcgggtcctgcccctcagtgtccagtctgccttggctggaggggctgcaggggtgtgttggcgccacctggtggagacagggcatcacagcaggtgggagcccagtagaagcacaaccaaaacatgggtaatgtttaaaattttctggctaagcgctgtggctcacgcctgtaattccagcactttgggaggccgaggtgggtggatcacatgaggacgggagtttgagaccagcctggccaacatggtgaaacatcccctctactaaaaaatacagaaaaattagctggacatgtggcgcgctcctgtaatcccagctactcgagaggctgagacacgagaatcgcttcaaccccggaggggttgccgagatcgcgccactgcactccaggctgggcgatagagcgagactctgtctcaaaaaaaaaaaaagaagaggggaggcgaggggaggggaggggaaaagggggaatttgtttggagctgagacatccatcttctcctgacctcagatatttgcactcctggttatgaagccttcacacttggactgaatacaccaccagctttcccgatttccagcgtgcaaatggcagatcgtgagacttctcagcttccataattacatgagccaatttatatatataaattgggtcctccagaaaaacagaataaattatatatataattatacgcataacttaattaaattatacgtataacttagctatatatataatttattctgtttttctgaagaaccctactgacacaaatgttgagcatcttttcatgtgcttattggcttaataacttgtacatcttctttggggaaatgtctattcaagttctttgcccattttgtaactgaactattaatatttgtctttacattgttgagttgtaaaagttccttatatattctagatactagagccttatcagatatatttctgcaactattttctcctaatatataggttgtgtttttattttctttttctttttttttttattgagacagtctcactctgtcacccaggctggagtgcagtggcatgatcttggctcactgcagactcgacctgccaggctcaagcaattctcccacttcagcctcctgagtagctgaggttataggcacttgccatcgcacccagctaatttttgtattttttagtagagccgaggtttcgccatgttgcctaggttggtcttgaactccctgcctcaaagcgatctgtcagcctcagtctccctaagtgctggaagtacaggtgtgagccacagtgcccggccatctattttcaatagtgttttttgatgtacacaggtttggaattttgataatgttcaattcatccatttttttttttttttttttggttctttctactggaccaccactcttgagccctctaatccaacctccacgcggcagccagagggagctctctaaatgtaattactctttccctgctccacctgctcaaaacagtgtcacatttgtgatttaaaacagtatttctcaaacctaatttgcaaacaaagcaggtggaactcttcttgtatgcacagcatctgatttggttggtctggcatgggtctgggagtgagcacacctaccaagcggctgctggggtaacttgcgttttccactgatgatttcagcaatgtttccggtcccacatgctcctccagaaccttgtactcccccatgaaaaggtggagtccatttccccttcctttatttatttttttgagacgaagtttcactcttgttgcccaggctggagcgcaatggcgtgatctcagctcaccgcaacctccgcctcctgggttcaagcaatgcttctacctcagcctcccgagtagctgggattacaggtatgtgccaccacgcccagctaattttgtatttttagtagagacggggtttctccatgtcggccaggctggtctcaaactcccgacctcaggtgatccgcccgcctcagcctcccaaagtgctgggattacaggcgggagccaccgcgcccggctatttccccttcctttgaacctgatcaggacttgacgatggcatcaacatggtgagagtgaccctgcatggcttatgaggctgggttacacaaggcgatgttgcttctgactggctccctctcaggatacatgcccttggaacccatcctctaagctccttgggagcccaacttagcccatgtggagacaagacagggagagaaacagaggcacccccagccctcagccagcatcaaccgccagacaggagagcaaatgcgccaacaatgattccagctgaagcctcagacagcgtggagcagagatgagggatccctgcagattgcagatgcgtgagcaaaatgcatgctgtcactgttttgaaacaacaatgtctgggggctgtttgttatgcagcaatagacagctgtaacaatgctgttactgctgtattccatgaatgactgcactttgagtagcagggggctagatcactagataagccccatggcttctgtgtatgctatttttctacttttatatccttttcattcactttttttttttttttttttgagacagagtctcactctgttgcccaggtgggagtgcagtggtgcaatcttggcggactgcaacctccacttcccgggttcaagcaattattgtgcctcagcctcctgagtagctgcgactatagatgcacccccatgcctggctagtttccgtatttttagtagagacggggttttgccatgttggccaggctgatctcagactcctgacctcaggtgatccacccaccttggcctcccaaagtgctgggattacaggcgtgaaccactgcacccagcctcattcactttctttacttggctcatttttccttgttgcctcaattctcctctaagatcactttcctgacatttcagcctgggcctgttgccttctctgggtcccctccgcctcctgtgcctcccccatctcagccttgatccctcagattatacttcctctgtccccaccctgaccatcttggctgtccctggatagggatgggtatcttctcccactggtctgggagatctggaaggacaggcctggaaaagacttggtcactgctggaaggagctcagttagtgtggtgctgaggacagtacgggtgaggctggccccttcacccaaactcccactctcttccatagatttcacctctgtggcccaggccataggattagggcaactccccttaaacatcgagtccatcctccaagctgtccttttttttttttttttttttttttttgagacagagtctcgctctgttgcccaggctggagtgcagtggcgcgatctcggctcactgcaagctccacctccagggttcactccattctcctgcctcagcctcccgagtagctgggactacaggagcctgccaccacacccggctaattttttgtatttttagttgagacggggtttcaccgtgttagtcaggatggtctcgatctcctgacctcgtgatccgcccgcctcggcctcccaaagtgctgggattacaggcgtgagccatcgcgcccggcctcatgctgttcttgaatagtgagcacctgttacaagtcgccccaccagcctctcacttgtacccccctcatctctttctccccaagagacagaggaccctggcacttgtgaagcatgacccagaccctggggccatggcatccaacatcctcattccccatgacccctactgtctagatgtagctgccaagagacccccagactccccgggcctctgtctagagtgccaagacagagagagaatgccctgccgcttgcatgctttgtggggtgtccttcccccttccctggctgctaggcgtgacttcaacgttctccccaacccccaaacagcagcactgacaccagctgcagacctggctcaggttagctaatgaggaccaggctggggatggagcctgaacccctaaaccccagtcctgtaccccaccctaatcctggggtctccactggacaaaacgaagcagcttggtttttcgttgttattgtttttgagatagagtatctctctgtctcccaggttggagtgcagtggcgtgatctcagctcactgcagcctccgcctcccgggttcaagtgattcttgtgccgcagcctccccagtagctgggattacaggcgcgtgccaccacacccagctaatttttgtatttttagtagagacagggtttcaccatgttggccaggctggtctgaaactcctgacctcaagtgatttcccagcctcggcctcccaaagtggaagcggcttatttttaaggagaaaactcccgtggaaaggaatcagcacctcctctgtcaacatttcacttctctgaaaagactctcacttccaacagaaagtgctttgtaacacaacaatgaggctgggcgaggtggctcatgcctgtaatcccagcactttgggaagctgaggcgagtggatcacgaggtcagaagttcgagaccagcctgaccaatatggtgaaaccccgtctctactaaaaatacaaaaattagttccgtgtggtggcgtgagcctgtaatcccagctactcaggaggctgaggcaggagaatggcttgaacccaggagatggaggttgcaatgagccgagatcacgccactgcactccagcctgggcaacagagtgagactccgtctcaaaaaaaaaaaaaaaagaatgagaacatatggacacagggaggggaacaatacacacaaacaaaatttagaaacaggtgaaaataattttagtaatatttttactaatactgatatgctcaaaatattattatttcaataagtaatctaaaaattattgagatgtcttatgttcttttcatcatactaagcctttaatatttggtgtgtattttacactcacagcacatctcaatttgcagtccccatgtttcaagcactaaataaccatgtgtgtccggtggctaccatactggacagcgttgatctgaaatcgcatctgtatgcatcaccagcatatttgcagagatccccatctcagcagcacacctgaggctcatctgcgaaagcacctgcaacttctctacaacctcccacatcacctccaaacacatcctcatgtcatctgcaaacacacccatagctcacaggccaatgcctaaatatcattgcaggcaccttcagagaaagcacttactaaaggggtatacttgattccacatctgctttgacctgcaaatctcccttctcctttacatacatttgcatctcatttgtatgtcaatctaaatccactggcagagcctcagatcatcatctcaaagtcaggtggatgtggggctgggcaggcctccaggtgttcctcctcctgcttcctctggggctcttgatcctcctcctcttccttgctgctctcctcctcctcctccaatatggtgaccagttcctcccgcagcgcccccatctccagccccaggctgcacagctgtcccagcagctggacatccactcggcgcaggttcccctgccagtaggaaggggacgtcacagggatgccaccccagagagcaaggggtctctccaggacctgggtgagagcaggtcccaactcatgtcctggccacagcgcctgggcagggtcctcactgtgcccatggaccctaactgccttcctgcttctcagagtgtctcttgatctctaactcttctctttgtctctccatttcattgtccctgacttctctctctctgtctcctccctctcttatctatatctgtccctgtttccctttgtctctgtccccatttattttttgtctttccatgcccctgtctctctgtctttatgtgttgccatttctctgcccctgcctttggctctctttctctcgcttgccctctctctgccctccccaactttctcaaattcagtctgtctctccatctctgttcctgctctccgtctctgcttcccacctctgtccctctcttttgggatctccctgtccccacctctgttcccgtccctcactctatgtctgtctctcggtgtctgtacatgcctctcatgtctctgcttctatctctcagattctgtttttcgatctctggccttctctatttttgttcatttccattcattctcatttcctctctttctctttcccttccaaacccctcactcaccagctcctccctgatccacagcagactatcgcaggcacctccagtgtctgcccctgcagtcctgagggtctgaccagggatttccactggggagacctccctcagggcctgggggggtgggcccagccccggaggcaccagtccagcctgattcagctgcctccacagttccatcgtctctgagctatggctgcaaggagcaggaagtagcaaggtccagggtggcctggtcccctggggagctgtgtgcgtggtggagagtaaagggcagagggagtgggatgggggttcctgggaaaggtatcccaaagtccactcttcagagagaatcagctggccttgtgcttttctttttccttctgaagtctaacctcaactctgctcacagggttcaaacatagcctcttgcagaggtctaactccacccttccctgcctgtctcaggcctgacccctcaggggcgctcagtgtctgtagatgcctggcaccctctgtccttccacctgccccccaccaccacttctccagcctctcctcagcctccatttgacctctggcttgcccatagcttggtccttgcttgtcctcttggcacgggtcatcctagggctttcccaccagtgtgcctttgggggcaggaatggctcccaggggcaccaagacagcaatcccttagctggagtgcctgtgtccaggctgctggcctagggccaagcagccaattctgctgaccctggacttgcctatgggtatattatccctgttgagggtgagggcttctgctgtggaaaagtctgggaagcactgcaggcctctctcggccttggacccttccttcagacccaaggtgcatatatatacatatatataatggtagatcacgaggtcaggagatcaagaccatcctggccacatggtgaaaccccgtctctagtaaaacacaaaaaattagccgggcatgctgccgcgtgcctgtagtcccagctactcgggaggctgaggcaggagaatggtgtgaacccaggaggtggaggttgcagtaagccaagatcacgccactgcattccagcctggcgacagagcaagactccatcttaaaataaacaaatgaacaatatatatatatatgtattttgttttttgagacagagtctcgctctgtcatccaggctggactgcagtggtgcaatcttggctcactgcaacctccgcctcccgggttcaagcgattcccctgcctcagcctcctgaacagctggggttacaggtgcacgccaccacacctggcgaatttttgtatgtttagtggagacggggtttcaccatgttagccaggctggtctcaaacccctgacctcaggtgatctgcccacctcggcctcccaaagtgctgggattacaggcgtgagccaacgcgcccagccccaagtcccttttaccatagaaagtaacatagtcacagtgcccagggattcacaggtatggggagagggttcgttattcagctgccacacccaccttcctaaacctgctgcccttccagtttcctcacgtgcacagccacgcccgtctgcttttagtttctcaatctgttggcttaaccttcaaaacaggcccaggatttgagcacttctcaccattccctctgccccatccccattcatctcttgcctagactgctacagcagcctcttttactggtcccctgcatccacccttgccctctaaggcaagggtccccagtccctgggccaaggaccagtaccagcccctcgcctgctaggaactgggccgcacagcaagagatgagcagcgggtaagtgagcattaccgcctgagctccgcctcctgtcacatcagcagtggcattagattctcataggaggcaaaccctattgtgaactgtgcgtgcgggggatctaggttgcctgctccttatgagaatctaatgcctgatgatctcaggtggaacagtttcatcccaaaaccatccccaccccacccccgacccccagtctatggaaaaattgtcctccacgaaaccagtccctggtaacaaaacggttagggaccgctgctctaaggtacattctccacctggcagaaataatctttacaaaatgtaaatccgattttgacactcccttcttcccactgtgaatagaataaaaccctaccaggcctgcaccgtcagcccctgcccacctctcaacccagtctcctatctctgtctgcaagctggttcccacctcaaggcctctctgctctagaggctacctctccctgcagcgcttttcccctagatctttgaatggctctttccttatcattcacttctacttcaatgtcacctcttcagagaggcctttgctgatggccctacacccagtcacttttttttatctgcttctcatcaaaattgccttgctgattcctttgtttcttattcatcctctcccacatccatcctctcccagcccagaatgttgacttcctgagagagggactgggtctgtcctgctcaccatggtaacctcggcatctagaacagtgcctgccatcacgtggtaggtgctcagtaaatattcttggaactaatgaatgaataattctatccacaagacttcacaatggctcttcatgctgcgatctagctttcaactccaaactggtcttgagatctcacctcagtctctaaccttgacatctaacctcttcacccactctcttacctgaccctaatttttaaaaatgacgtggtcagcttttcagccccctcattccctgtttttaggaggtagtgagtggaagctggaagaataagaaagcttggggagactgcaattgcagtcaggaaagaaaggtactctgccgggaagaacaccccatcttctcctagggaaagattgtggagtcctggggtttgttttgtttttcaattttttgttttaagagacagcgtctcgctctgtcacccaggctggagtgcagtggcgcaatcacagctcactgcaacttcgacctccccggctcaagtgatccccccgcctcagcctcgtgagtagctgggaccacaggcgtgcaccaccacgcccggctaacattttattttttgtggatataaggttgccctatttctttgtggagataaaggctcccctatgttgcccaggctggtctcgaactcctggcttcaagcgatgctttcgcctcggcctccacaaagtgctgggttcacaggtgcgtgagcccgacctgtgtctcgttttgaagctcagggagagggcgctgtgagcaatccctaaaccctttaagagtaaaaagtgcgtgcacctttaagaggacggttagaaaacgcggggcgtggccacaggagaataagttcgcgctgaaccaggagcgtgggataagaccggccccttccggttacgaaaccttagcaagatggcggctccctgggcgtccctgcgcctggtcgcccccatgtggaatgggcgtatcaggggcatccatcgcctgggtgcggcagtggccccagagggcaatcagaagaagaaaaggacaatactccagttcctgaccaactatttctacgatgtggaggctctgagggattacttgctccaaagggagatgtacaaggtgcatgagaaaaatcggtttcgagacaaggagtggatcaggccagataagtatggccatttctctcaggagttctggaatttctgtgaagtgcctgtcgaagctgtggatgccggtgactgtgacatcaactacgagggcctggataacctcctccgcctgaaggagctccagtccttgtcgctgcagcgctgctgccacgtggacgactggtgtctcagccgcctctacccactggccgactcgttgcaggagctctcgctggccggttgcccccgcatctccgaacggggcctcgcctgcctccaccacctccagaacctccgcaggctggacatctcggacctccctgccgtgtccaaccctggcctcactcagatattggtggaggagatgctgcccaattgcgaggttgtgggagtcgactgggctgagggcctgaagtcagggccggaggagcagcctcgggacacagccagccctgtccctgcctagcctttagccctgtccccactcacgtggcttctcagcgggctgcatggaatgtctggtagctcaccacacttctggcttccatttgtcttcactcaacgtcagggtgggggagtggtgctggccaatcacaggagagagcgtgagttcccagtatttattcctggctgcccttggctaaaggtcacagctcctgtcaccctgtcaggcagccctttccatgcccctgttcaggcctggggaggtaaaggctcaggctgttagtagccgcagagagccacactcaccttgtcaggagactcttctcaaactgtccttatgtgagtgcactgccatttcttgcagggaccctgactgacacaggggctactactgacactttacagggatggttctcccccgtgcagggccgctgtgcccactgcaggacatgcagcatccttcgccccactccactcactaaaggccagcgcaccccaggccccatagtattgctggttatggatttattgactttatgttccaaattcagctttttcagttggctgttttttgaaaggggataagctttgtcagtagagggcaccgaacaggcattataggaggaaaggcgcctccttcgtggttcttgttggcctccactgaggcacctctctgggaataacgttccccagcaccccaaatggatttccagtcaattcagaagcattttaccagtgaagccctcattattccagttcactgttaaagccagtaattctctatattaaactttccctgttcggtttatactccggagtataaaccgaacaggcctgccatagaaaatgcaaccacagaaataaaatggattgctttttttccctgtagtgaaaatacatttaaatctatctca

SEQ ID NO: 735327 - DNA, 188321 bp, Homo sapiens
ctccaaggctgagggatgaggagacctgctgaggacccagggccttatctttccatcccactccataggtcccagtattgactgatgctgtcttcacctcctagcctcacttttaaccttctggcacccgcccaccactgtccagttcactattgaagccctgccgtccagtgctgcagagggaaaggatgttcttctactggcctgcaatatttcagaaactattcaagcctattattggcacaaggggaaaacggcagaagggagccctctcattgctggttatataacagacattcaagcaaatatcccaggggccgcatacagtggtcgagagacagtataccccaatggatccctgctgttccaaaacatcaccctggaggacgcaggatcctacaccctacgaaccataaatgccagttacgactctgaccaagcaactggccagctccacgtacaccgtgagtgattcccccatacctctgggtgctggcggtcagttctgcttcacacacatgagattgtcaggcctgggctgtgcctgcatccccctctgcattttgtcccgtgttgagatttgggcatttagtgcaggacacacacatggtaggtaaacttcaacagatcagaattcctttcctgcatccaggccctgcagacactgatggcgggggcgggggggcctcagcagggggaggtcagtctcagccaagcaccccatgccctccccatgaacctgaccctgagaaagaccctggagaactgggtcagggcctggcctgagggcgtcctgggaacctcacaaaagcccagcctcaggactcctgactccgtgtgaccccgggaagcctgtgtcagggctggggtgtggtctcctgggcagggcttactgggagcaaggatttaccagatgtctgcgggctgtggttcctgaagcttctcatcagtgagggctcagctcccagagtctcatctagacaaggacagagcctaccactttccctgggactcagcctggagagggcagggggacaggattactagggcattggccccctgaatgaggagcttaagagatgcccttgggcagtcagtggcccaggggtaggaacagaggggagaaaatgttcctggcagcttcttgtccaccggggatcatgcccaggggtgctctcccatggaggcaaataacagatgctgttgatgtgaacacctcctctgtgccaagcttcatgtcagatcctgtgaataatttaaagttcattcacagacaaagtggcaagcctcagaccattttccatttacatattgtatggaggggaaactgaggcacagagagatacagacaccggccacggtgggcagatcgcagctggcagagtcacatgagggctgtctgcagctgctgccacgtcctctccttcatccctggtgccttactaggtgtctgtggaccttagaacagccactggttcggatgttttcttcttaggtgtctacagctcggagggggagattctggtctggagagttatgagtaaatacagaattaatcagttttttcttaactaaatcacctgcctcaacaatcagtcagtgctggggaagttcaggcctcctcgctcaggtccacaccccgcatctctggacatgaaatggcttcgtgtgttttctgatgtgtgggtatcattccaacaggaggataaaggggaggactttgctttctctccccattcacaccctgcaccagccagggcccagtgtgagacacatactccgtagttctctcatgaaggagggagggaatgaatgaaggaatgatctataacctcttcagagacagagacctggatacaagatcctaggaggttctgggcccaacgtgagacacacactctgtagttctcttatgaaggagggagggattgaatgtaggaatgatctataacctcttcagagacagagatgtggatacaagatcctaggaggttctggccacacctgttttctgtccctctagagcctaagacccatgtctcattcatctggcccgtttctcctaaatctgcccctgggagctgagtctcatctgaccctggggctgcagggctgtgggaaggttttcaggggagggatcaggcttgcgggtagtcccacacgtttgccttacaccctggagctctacctggttctcactatgaatatcccataataatcccccctatcctttctggggagtagaaaaaaagtaaatatttaaaaatatgccagagcatctgttcttcttagcaagttcagatagttattagttagcaggaataaatcgttattttaccagagcctcacctgctgggggtttatgggagcctaactgactgaggggggtgggaaatatccaactccagccccctctagccatcatgtcccacctaaaggagagaaaaaactgagaggcacttgtgacattcacagcccagggcacagactctatccaggaccacagaacccctccctccccccactcaccaccgcatcactgaacgcctgctcacccaagttcctgttgcccagtacatcatgtcctggctttcaacaaaaactacaagacagactagaggcaaaaaaaaaaaaaaaaaaaatgcagttcgaaagacagaacaagcatcagaaccagatgcagatgtggcagggatgtggcagggatgttgaaattatcagaccaggaatttaaaacaactctggggccaggagcggtggctcatgcctgtaatcccagcatttgggaggccgaggcaggcagatcacctgaggtcaggagttcgataccagcctggccaacatggcaaaaccccgtctctactaaaaatacaaaaaattaggcaggcatggtggtgggtgcctgtaatcctagatactcggaaggctgaggcaggagaattgcttgaacctgtgaagcggaggttgcggtgagcctagattgtgccactgcactccagcctgggcaacagagcgagattccatctctaaaacaaacaaacaaaaaacaatactggctaatatgctaaaggctgcaatggaaagcatagacaatgtgcagaacagacggatgctgtgagcagagagatggacaggctaagaaagaataacaacagctactatatctatctatctatctatctatctatctatctatctatctatctatctatatatatgtatatatatgctagagatcaaactcactgtaacacctggatctcagagtggttgtgaggatgtttattaggagattaaagagattaaagcagagttatacacagggcgagagctcaactgatgctatcaactagtattcttatttttttgatgttgttattggcaataaaatcaggaacaatgcagtaaaaatttggttttatcatgtacgagttctgtgaccttccttgacttactgaggtactgtaagtctcagattctaactctgcagatggcggtgatgcccctctccctcaaggtgatgtgaggatgagatgagctgtaggtaggttggtgcccactgtgcctggcacatggaaggcccctgaaaatagtcaatgaacatcatccccgctcatcagcatggagttgacagtgagggctcgctctctgtgacaatcatggaatggaaaagaagaaacaagaggaagactgggcgcagtggctcatgcctgtaatcccagcactttgggaggccgaggcgggcagatcatctgaggtcaggagttcaagaccagcctggacaacatggcgaaatttcatctctactaaaaatataaaaattagcctggcatggtggcacaaacctgtaatcccagctacttgggaggctgaggcaagagaatcgcttgaacttgggagatggaggttgcagtgagccgagattgcgtcagtgcactccagtctgggtgacagagcaagactccatccaaaaaaaaaagaaaaagaaaaaagcaacagagggaagaggtgtgacatgagaggaagaagggatttaaaggtacaggagcagggcgaggtgcaagcacctgtgggagaatgtaggagttggtacatcccagtgtgtcaagtctgagacacagaaaatggtgcaaccgtggagagcaagggagtcagctatgaggacagcccaacagaccacactcaggctctggagcatttccttcctccctgactatgcccctgccctgcaatgccccttatggtttcccttggaacaaacttgggccttgtcccctttgccttcccctttctgcagaaaacaacgtcccaggccttcctgtgggggccgtcgctggcatcgtgactggggtcctggttggggtggctctggtggccgccctggtgtgttttctgcttctctccaggactggaaggtaccgcagcttttccccagcctcctcccacccctaggctgaccccagtcagggaggagggagaccccgccctgtattcagggccaggctttccgcatcctcccaaggaatccttccctctcattccatggctcctcccttgccagctgctgatcctaggctgcctcttcctttatgaatgtggcacagttaaggttgcacccctgagtgctgtcctagttccctaacacagcaaagccacagctgcctggagggaggaagggagggagggagggagggagataagacgggagtgctcagaacctggtaccttctgctgttcattgaatttacccacccagtgaggagggatttgcaggcttgagatccatggtgggggtcctgggcatggtcacgcagtggggagtggcaaagcctggacaggctgggtagggtcagcaccccatcgtgattgatgtccctgaggtgtgagatgggagaacctggacctcaggacctgctgtcctttatgtctcttgccaaggggtggagagagagaggacaaggccattgccccatttcagcatctccaggcctgaaaggagggtctggccatggcagggatactgagttctgggagaatatgatacatgctccttgcctccccatgcccccagctcccccagtgtcctgcacacacagccggccctgctttccctctggggccttgacccttcctctcaggcaaacgcaggtggtctgattccctccctgagtcctcagtccctttcctgggtccctgggtcaatgttctcctcacccggcatctgcctgggggggtccttcctctctggccaggacagacgtgactgcttaaggcctatcctcagctccccgtcctcggccgctcctaccacgaaactgatggagacaggaggccttcactccagtccttgaaaatggagtcccttccttgtcctttattctgcccctaaacctgtgatttctccctgcaccctcatgaataatcctgacctttcctagggccagcatccagcgtgacctcagggagcagccgcccccagcctccacccctggtgagtgtcccttcagcccaggtgtgggagcccctaggcctgccctacggtgtccactcctgccagtcaccccctgggggcctctgaccctttctttggggctgcaaggaggatgtcaggaaacatgacacaggggaccccgactgtcttgttcagactgatctgtgggctctgggtcgtgggtcacctcctcgacctcagctgctcaggtctcccctgggaagaggctccctctccctgattctctgggagctgaggacccctacactctcctgcaggaggggcccaggctctcctcccaccctgctgctcactcctgtctctgtccccaggccatggtccctctcacagatccaccttctcggtaagcctgttccctccccagcccttttctactggggtcccaacagtgcaggctcagggcagggggaccatcaaccccacagcacagcactgacccacctttccccagaacagtcaggtcaaagtgagtgcctccagccaggatccgggcctctctacagggccaggaccacccacgccatgtgctgacccctccccgggaccctctacacctgaggagaaccctggagtccagcaggtgcagaatggacactgggaccatcagtcagaggcccacattaacaagggtgcggggtgggcccagccaggacaggggtcagggtgttgtgtccacactgggaggctgagctcaggggcagagctggtcaatcctgaggggaaatgagtggaagtggaggcagggaagtaagtcctggccgatcagagacaggaaccttccaggctgggcttccgtgaccctccctccctgtcccctgacatctcctctctcccctgcccaggcccctctacccagccccagaacagccactcccatctatgaggtgagtgtgggccatggatgttctggtcccgcaggctccaggggacccaggatctgcccccaccagcacctggctgagctcagattcaggaaaatgcagtgaaaatgagaacaggtggtggtgagcagaggagggaggggcctgggaacagggaccccctgagcacagccaggttcagccccagagaagccctgggtgggcccagagcctgggagatgccagacactgttctgagaaggctacaggggttgaggcctcttctctgtttttacaggaattgctatactctgatgcaaacatttactgccagatcgaccacaaagcagatgtggtctcttaggttcctctgggagctgctcttgtgggttgatggagcgtccccaaagctcccagccctggggacggggaaggacatggagcctgagccagagaaccagctctgagtcctgaggagacacaggcctggggacagggagggatgggagtccctgctgaatatctggagaccctgacaggttgccctgggctctgggtgggccgggacaaaggcctctcatcaccacaggaagcgggggcttgcaaggaaagtgaatgggcctgtggcccacccggggtcaccaggaaaggatctgaataaagaggacccttcctctcattggctctttttctgctcacgggaacttagcagaaactcacctgaaactccgtgtccattctctcccgggtcacacagggaaaatatctccaccttgtctcaaccacagtctctcttccctgggaggcagaaataggggttgggagtcaggctggggtgggccctacacaggaaagggcaagattcacatgagccctgcccagccagccgagcgctcagctgtcctcacactaccccagggaccaaggccatgcacagccccagcctgggtccctctgtgaatgcatgtggggtctcaggagcacagaagatggggccatctgatgtccacaaaaggtgagcaatgcgggagcaaccatgggtggtataggttgcggctgtggcccctacgcagcctccagtgtcctgacccctgctgccctcttcacccaggccctggaggcccagtctatcactgtcctccacaaatgaacttacctgtccccaaatccaggatcctgtgtgcttatacctggccactaggttctcctctgtcccagtggctactgctcaggacatctttatccctggtggggcacagagaggggctgtcagagcaaccaagattaatacagacgcataattcagtccttgagcactacccaggactctggcccctcattgctcatcagttcccactttaccccctggcatggatctcactgagcaagccaactctttacacaggagcatccaggtcagaggtgcaggactcccccatctaaagctcatgcaggctcccatggcgatgggacaacctgtctgctcctctccctggcccacagccctatctcgcctgcagctcctccacacacctgggacagcagttctcagcccttccctgagggcccctggaagggtgatgatctcatataggttcacttgaaccaggtgccaccttcccacaagtgagctggtgcctgcactaaagcacagagccacagttcccaagagtgttctgccactgccacaggtcccaagagtgttctgccactgccacaggttgttcgtcctgagatgagaggtaagaaaacaacccgcaatgggttgttttatatcgggatttgcatcaggatttagctctaaatgacccctgatcccacctgcacacagcgtcagatgagacaaggtgaggcctctttagttttctgttgaggctgtgacaaattaccacaagcttagtgacatagaaacctgaaccaaagtgcccacatggctgtgttctttctagaggctccagggaagagtgcatttcctctccttttccacctcctagaggcctcctgcaaccttggctgtgtcctctttctccatcttcaaagccagcagcacagcatcttgaaactattctgtgccctgcttccatccccacatctccacctcctcccacctccctctctcacttaaaaggaaggagccttgtggttattttggacgcacctgggataaaccacaacaacctccccatctcatgatccttcctttaatctgtaaagtgtcctttaccacgtgacatgtccacagatctggggatgaggatgtacacatctttgagaggcccttgttctgtccatcactcctctcaaggccatcttctcatcatcgttcactacaaactacacatgggcacctggatgggttcatcatgactgtggcgtcagttcctgcattaacatccccagcaccctccagatcctgagagagggagacggagggctctccatgcccctagtacctctccaccttcttcttggtgacatgcttagttgctaagaataacagaaagcggaggtgactgaaagatcacaactcaccggcccttcaatagttcgtggacatcagcaccacggacagtgactcagtgaggctaatttccaggtggcagcagggagcatgcagataggagggaactgcaggaaaagctgcccattctattctatatgagaaagagtgtaagaaagaggaagctattacagggataatgctattcttctctaatccataaattgcgaaacctttgcatgtctggatatcatggtttttagcacatctgctgccactccctgcagggctgattgctgcatccaggatgtggtctcttggggggctcacagcctgctttggcctcatggtgagtctccctgcccctgacactcaggccactgtctctgcctacaacatggtgggaaccttccatgattaacgtctgattctctgtgcctgacctttgaagcacatccatcactcagcctggagcatccgctgagctcagcatcctgctcctccatccccagctgagcccttgaggagatgcttgagaggatctcctgggctcctctgtgagctcctccaggctgagccttgtgcttggtgtcagaggcctttgccatctgcttgttctttccataggcaaataatcctcctcagggacaagtggggcctgaagatctgtctgaatatctatctatctatctatctatctatctatctatctatctatctatcatctatctatatgtatgtatatatgagaatgctttattaggcaaaactgcatactatgaacatgctttaaaatgcaacaggatgagatgtgaagacataaagaacaagtgtgtagtgacacatggctatcagaacacactgaagaatccacaccgcggccgagagcagtggctcacgcctgtagtcccagcacttttggaggctgaggcaggcagatcacttgaggacaggtgttcgagaccagcctgaccaacatggtgaaaccccatctctactaaaaatacaaaaaatttagccgggcctggtggctcatgcctgtagtcctggctgttcgggaggctgaggcaggagaattgcctgaacctgggagacacaagttgcagtgagctgagatcgcaccactgcactccagcctgggagatagagtgaggctccatctaaaaacaaaacaaaacaaaaagaatccacactgcttccccgcttcactttacccagaaaaggaatgttctaggccacttcctcttcagcacacatccccagggaactaaaataggttcacagtcacccccatcttcctcattcccatcacctcttacccacagaggcatctctggtcctacagatccagccctgccttcaagaggcacaggtccaacccatccagtgtccctgctagtcacacacagcactcagggtacaatggagggcttctgtgctttggatgggaacaaaccccacctcacattcccacacctgagaagccaccagggtcctctctgtcctgtcctcacactcaatgtctgtcctgggtcacccttgtcatctctcctggaaataggcatggctcctgacaggtaggattgaggctttgtcttttcaggagtccctcccactctgagcacatgaaactgctcagctccatgcaaccctctctcaccaggggccttgttctctgggtccctgaatacctgggtccatgccatgtacattttaagaaaaatgacagtgactctcaccctgacatcctcacccaaggcacgtgtctgacaagaatcaccaggtgagatacctgtggctccacacacctgaggcttcactgcgcaggggtgtcctcatccctctcctcccacccctagggacagtaagcaccacaggctgccttggaccaccagctccccctcccagacacagcctcagatctatactgacatgctacatggagaggctctgatgaacagcaggtattaggaaatcccaccgaaccaggtgccacttgcggccccactcctcctcatatctgtgactgggacagacacacataacacacctctgttcaccgcccagcccccaaggtcaatcacagtctgcttctcccctagatccactgctccccatgtcttccgtcctcagctgcatcctgggtggcctccttgctgttcttgtaccccagaggcaggttccaacctttgtgatgttgcctgcaatgcccaaactttcccttccccttccccttcccttttcccctcccccttcccctccccttcccctccccacccctatcccttcgtcttcccttgtcttcccttcccttccctataaagccaaacatacccatccacctaccttgtggtcaaagtcatcagcctcctgctccactcagtgttctctgaccctgcatatggaggtggtggcccctcctagaacacccaccactcactgtcagccttgcgtggtaatcacagattttgcaggggttacctgtgttcaggtgtgtcacctgtggaaccagaactcttggaaggactggcagagggagctgcttaggatatctcagggctcctggcatctggtctaccacagggctattaacaacagcacttagggacaaggtggaggatggacggttaagagggtaaatatggatgatgtgtgggcaaagaataggacacaggaacacatgcagtactcaaataattatgccaagaaaggtgaggacatggagatggacattcccatatacttctgatgggactgcagtttagtccctacagcaacattgacctcatcatgtttaacgcgcacacgctctgaccactatcctacttctgaaggcctccctgtgctgtgagctctgagaaggccaagcttgcctgttctgtctctgctaaagccagagaccagccaatagcccagcacagggtacttcataaatacatgttgaaggaatgagctccaggaacagtactccacatggtagagatgtgtgtatgaggatgttcactgcagaaggtcatgtcaatgtgacaagtgacgagcagcctcaaatccagcaacaggggtgtgggtaaaagatcatagtgtagccatgcaatggaaccaatgaaaaaaccacaattagagcaaatccacatgtattaataaaggaggtgccctccatacatgctgcacctaacagaatgttgccaaataagaatgaaaaatgatgatatttgggctgtaaaaactagaagtcagctaaataagaatgcatcgaaagtatttgtgaatgcttacaattttataatgccttggcatccgttttggatggaagttggactttctcataccagaagcagggctcagtcacctttgaaatagtttccagttctccacctccttccagttcctcagtgtgattgatcagatatctgatttatacaactgcctcctggtgacctcctccctatgggacttccggatacagcccgtatgactgccccactgaccccacaccctgcctgctgcagtgaccacctctaattacctggatctcatgtctgcttgcattaaatccaccaattaaaactccctgaggacaatctgtttgaataatattctgtaccctaataaaggccttgacccatgggttccccctctgtcctccccatactgcccctgacctctgtgtgtgtgtgtgggtgtgggtgtatgtgtgtgtgtgtgtgtgtgtcctccagacagggcctgtatcccccaggacctgtaagtaataaatctttattttcatcttatgtctctcgcaatcattggcaagagctctgcatcttaaagatcgcaaatttaagaaattggtgtagtcggcacaatagagtacctcttctgtttagcacaagatatctcggagctgctgaggcttttaacatcctcgccggtgtggctgcctcactggtgaggccgttctgttcagtgcaattcagttgctccactgtgtgctgctgtgttgctgctgtagagtgctgccatgttgttctccccaaattgttaccgagtaggaacctgtaatgtgctcccaaggtggtctaccccatgagaagggggattctccatctagggcaagggctaggtgtgtttctggaatcctaatagggaaggcatccacagagggtgaactccactcctccttagagtgaggagtgacatttcccatttattttccccatggaggtgccatgtattgactttttctttcactgtcccaaggttgagccaaggtgagctatggagaccagggcaagataccatttctgttagcaaagcaaatgggtgacaacgtgtggagaagctgtggttctcctgatggatatagcagagtgccatttagtaaaatcttgtcaggaggctgcccctggttagaccggcagtgtctgtagtcactaaggtggatgcgaattttaggccctgggccatggataatccctgcagacacagccgtggcttcatgtgatggggcaatcccgggctagtggctcccttgtttctgcatttcttgctgtggttgcacaatcaacacctcaggggttgattgggtcaccttggaaagagaaacagctgcctaggaggctggtgcacatggaggccaccctcaattttattctgctaacaagttgtaagattaaaacaacagggggctttgggtaccatcaggaacttgtcaagtaaacatccaaagacagaaagaagaaaaagaaaaagacattaaccgtctagaaatacaagccattttaaagattttgcttaaaagatgcgcttgggctgggagcggtggctcacacctgtaatcccagcactttgggaggccaaggtgggtggatcgactgaggtcaggagttcaagaccagcctgaccaacatggtgaaacctcgcctctactaaaaatacaaaaaattagcagggcatggtggcaggtgcctgtaatcccagctacttgggtggagaatcgcttgaacccgggaggcagagacggcagtgagccaagatcgcaccactgtactccagtctgggcgacagagtgagacttcatctcaaaaaaaaaaaaaaaaaaaaaaaaaagacgggcttgtttcgtcgttgtggagtcatcccagagagaggctactccctagagtcactgaccacctttcctcctccatcttttcctcttatcattctagagacagaaaacaagaatctcagctttaggtggctaacctcaccccccaagaaaagaaactaccactttgattgactacaaatccaagaaaaataaaagagaaactttaaaaagtactgagcaaaccacaggtctagcaaacataatgctagccctaggttacttattcatttacaacaaacccctagatataggaggaaaaaataaaaggtaattaaatatatacacatacaatattttaatataaatatataataaatagttaaattatgtatgtataatatgtaactaaatcaaagtaaaatttcatactttgattctattggaaattcaaaattcatttattaacttatatattaaggaatttatgtaaaaaaagatttttaaaagggcaccaatttgcttttgtgtctctacaacataggatctaatttaactttacatttgctaaatacactaattgacaaatattcatggatttaatcaatactggggctcaaattgtagccacacgtgggaatcccataaatttaaacactctgtccctattatcttgagaagaaaactaaatataaaattgaaaaaaacaggtatgtctcaatttacctgtaactttgcctaaatttcccggagtcatatacccattgctgtaaaacattctctattggacataggtgctctgagacaataaataaaatagaagtgtttttggtacttagacattggcttgacaaaatgggatcccatgaaacctcagttaagatagtgaatacggcccaatgtgagttgaaatggggcctttaaggattaaaacttattacatgaaacctagtaagtaatggggtgattatccatactgcttctccatttcatagcccaattttgacagttgtcaaatctggaaaaaacaaacaaacaaacaaaaaaacccctgggaatctgttgcctcacagagacacaaagtagacatcaaaattgtatatctcagttccagttccaaaatggtggcatagaagcaagctggctttactccttcacacagaaaaccaaaaacaaatatacagcaccaaaattattaccagatatattccagaactcaaatatgaaaatgaaacagttttcagagccacagagaagtgaaaaaaactcccgacagatgacaaaagaatcagatttccccatctgtaatgtccctccctgccccattctgcctggtaccaggtgtgtggaaaattttaccccaactcatggtttctacactgggaaatgtaagatcaatgcgggcaaccagtttctgcacaatcctgggttccctgtccctgccttaacccacaagaagcattgtgagtgcccgaagggagaaatttccctgaggacagtcaaagagtggggaggcaggactaccatctccttccctggaaactctgctgtgtaactcagccaagggagacatgaaatcagactggtgtttcagcagctccatgttgtagtaggtttgtttcacaggtatcctgggcatggacatctagccagctttcccacactgccaggatatcccctttgggacctccctcagttaggaagggcacactctgatcatttactagggccaaggtaaaccctaaaggtaacttagagatgaaaaggaggtagtgacctagcagtaaagaactctaagaaaatctatccaataaaaatcaaaacaagccagacaaagactaaaataaataatgaatccttcaatgtaaagacctggacttacatccacaagaaacagtaagcaggtaaccatgatctccccacatggacaaagtgaggaacaagtgactgatcctgatgagatggtgatgtgtgagctctctaatcaagaattcaaaactgcagttttaaggaaactcaatgatcttcaagaaaacatggaaaagcagttcagaaatttatcagagaaatttaacgaagggattgaaataatttaaagaaaacaaacaggaatcttggaattgagaaatatatttgctgaacaggaaaatttattagagtctctcaacagcagaatggatcagaggaaagaatcaacccaaataagactcccccaaggcataaaataatcgaattctcaaaagtcaagggcaaagagaagattttaaaacagaaagagaaaagaagcaaatggcataaagaagctccaattctgtggcaacagattttcagtggaaatcatacagaccaggagggagtgacatgacattctcaaaatgctgaaaaaatattgacatttgagaatactttatccagtgaagttatccttcaatataaaggagagagaaagtttcctagacaaacaaaagctgagataattcacaccatcagactagtcttcctgtaaatactaaagggtaaatactaaatacttcaatgtgaaagtaaaaaaaaaaacactaacatgcaaaacaaccacaacaacaataacaacatttgaaggtataaaatccactggtgaaattaagtacgtagacaaacccagaatactcaaatagtaattgtggaaagtaatccaatcataactctagcatgagtctcaaaatataaatctatcaaaaacaataatacattttaggaggccaaggttggcagattccttgaggtcaagagttcaagaccagcctggtcaaaatggtgaaaccccatctctaccaaaaaatacaaaaatttgcagggtatggtagcacatgcctgtcgtttcagctatttgggaggctgaggcaggagaattgcttgaacccaggaggtggaggttgcagtgagctgagattgcactactgcactccagcctgggtgacagagggagactctgtcttaaaaaaaaatagctacctgtttggagaaaggtaatataaaatatgtaaatagagacaaagtcaaaatttgcaaaggatgaaattaaagagtagagtttttttggggggttttctgtttctattattttatttgtgatctaagataagttgttaccttttcttctcttgaagatactttgttatatctatgtttttggaagtcttatggtaactgcaacgcaaaaaatctatgatagatccactgaaaataaaaaacaatgacttaaaacatactaccagagacaatcaaccacaaggaagacagtaaaaaatgaagaaaggaagaggggagttacaaaacaaccagaaaacaggcaacaaagtggcagtagtaagttcttacttaaaaatattgaacactgaatataaatggactctattctccaattaaaaggcatagagtggctgaatgctgcctatatgctgcctacaagaaaccacttcatgtaaaaagatacaaatagactgaaagtgaagggggtggaaaaagatatttcatgcaagtggaaaccaaaagagagcaggagtagctatactgatatgagataaactacaaatcaaagactataaaaagagacaaagaaagtcactatgtaatgataaagcgctcagttcagcaagaggagatgccaattataaatatctatgcatccaacacttgagctcccaagtctcccaagtatttaaagcaaacaatagtggatctaaaaggagagatagactgaatacaatattaattaggggactttaacaccctgctctcagcaatggccagatctttcagacagaaaatcaacaaggaaacttcaaagttaaactacacactagatcaaataggcctaactggcatttacgggacatttcactaactatctaactgttacagaattcacattattttcatcagcacatagaacattcttcagaacagaccacatcttaagtcccaaaaccagtcagaataaattcaaaaaagtttatatcacatcaagcatttgttctgaccacaatggaataaaactacaataaatgaataactttctggacacatacaacctaccaagatggaagcatgaaaaggcagaaaaacccaacaaaccaacatgaaactgtaacaaaaggaaaacccaggaccgaatgacttcactgctgaattctaccaaacatttaataagaactaaaaccaattctactcaaaatgctttaaaaaattgaagaggatggaacactttcaaactcattctacaaggtcagcattatcctgataccaaaaccagacaaggacaggacaaaaacaaacaaacaaacaaacaaacaaacaaacaaaaaaacactacaggattgcttgaggccaggagtttgagatcagcctgggcaacatagtcagaaccaatctcttaaaaaaaaaaaaaaagaaaaaaattagccaggcatggtggcatgtgcctttagtcctagctactcgggaggctgaggtgagaggaccaattgagcccaggaggttgaggccgcagtgagccatgtttgtgtcactgtactccagcctggggaacagagcaagatgctctctcaaaaacaaaaagcaagctgggtgtggtggctcctgcctgtaatcacagcactttggaaggctgaggtgggagaactgcttaagcccaggagttcaagaccagtctggacaacatagggggactccatctctcaaaaacaaccaaccaaaacaaagccaaaaaagaacataggccaacatcactaacaaacatagatgtaaaagtcctcaataaaatattaacaaaccatgtttagaaacacatcaaaagagatcattcactatgattaagtgagattcatcccagggatgccagtatggctcaacatatgcaaatcaataaatgtgatccatcacattaaagagaaccaagaacaaaaaccatataatcactccagcaagtgcagaaaaggcatttaataaaagaatgggttgagggagtggagcccatagtcagagcagcagtggtctgggattttggaagtagaaagaagggcagcaccactggccaggaccaccagggaacacccccataggccctgggtgttgtgctccagggagggttccctctggagttattaatcttggtgtccactttgcccagctgcccctcacagggtcagggaggatgaagggaaagcttccttctaatgaaagttcagggactcacagttcctagagcctgtagggagaggaagatcttcgaggaagagcacctgggcattggggcgtttgagaggaagatctatgccaggtccaagtggacaacctgtggactctctctccagggacatacgggtatctgggaatctcctgtagcttaaagaggtaaagacctctccctttagcctgaggactggaggatgctggttcaggtgaatgagtcctgcaggggctggtacaggcctggagggtggtggtgtccagggccttgggttcacccttagcatgattcaggccgggcggtgtttcacatgagcaagagggcctgggttcattgcttcaggacaatggtgaaatctcatggtggaagaaatcttgtccttgccagtgcccagctttcatttggtcttggcccagagtgtcctccctagagaagactcttgtcccttcttcacactgcccttcagggatatgccagccttatgggataagatggggtggagactgtagatgtgggtgggaatctctccacagagtgctccttctctcagcggttgcaccttgtctcagggcttcagcttgaaatctgggatctccaagcccttccctccccagtcctggccaggaccacatgggcagatgcattgtgtgaagtgcatttcatttggggtgtcctctctgcatggcaccctcccgttgattctctttgcgcatgtcagagtgcaggcaccatccacacctcctgctggaggagggacggagctgttgactcctgagagctgatcatgtgttcccaccctcacacacaatcatggtccatcctctgagggacatgtgttgccaccactgtggagatggtgcaactgacagtaacaaacagtaaaatctggtactgaatgggaccttaagccaacaatgacaatgtcattccaaggtgtttcatttttattgattcaatgcaagtcacctgatttcattgactattcacaatagctcgataaagtaaatgcatcatcaccaccactttaaagaggaaaaaggtgcttgggcagtttgtgactactgtggtggctgctgcattgctctctggtaaagccaagtaggtggtgggtgcggcctctgggctgggatgatccaccctcctggtggtggcaggggagccaagctggagccatggcctgtgcagtggtagcagctgaactgaccgctgctgcaggatttgcaagctgttacattttgcgaagccatgaagcacataaaacctcaagtagaacaagtgtttcaaagtctaccaaaatctgccttcagagattattactacagaggtggatatgaacccaaaatgacaaaacgggaagcagcattaatactagataatgaatgaacactagtaatagtagggtaagccctactgccaataaagaaaaaaataagagatgctcattaacatgttatgctcttaaatcacgcagacaaaagagggtctccttatatagtagccacaatcaatgaagctaaagatttactgcaagatcaagctaaaaacagtaggtgtataatgaatttttaacttcatattagtttatgtatatgaatatcaagtttttataataaaatgcctccaaacaaagaatatttgatttagggtttaataacttctaagaggggactcagatgtttcctgtttcacagtcagtctgagagggtcatttttcctggagctgacctgggtggaggcctcacactgatactccccagcatcctctctcctgatggggtttatgctgagcatacagtggccctgggacagctccattctctccatgagtcacagacgctggtcatggaagatccactggataaggttccagagtcatctgtggggcaggtcaggatcacaacatccttttcttctgtgactctggtgttgctgactcagatggggtcggagccactgaccctgtggacaatcagtggaggtgctcaactgaaagtgggctgagggcacgtcttctcctccatccctgggtccttaaggtaactgtggaccccagaccaactgacacaggagctagaaagaaattatttaggaagttagtgagggtaagagcgtccttggcaaggtttcccctttaacaaaaagcagcccaagataattccttttctaacaaagagcagcctgaaaaattgagctacagatgtagatgagcaagatggaagcttgcacaggtgaattccagtaggtgtgccaatagaaaagggctgcctggaagccaggtatgttcaacatggagactccatcctcccttttctccattaccacatgtacagtaaaaaaccaggcaacatggcaccggccaggtagacaatccatctgcatgacaaaagatcagagtggggcagccagcaaatggcacagctggtctaaacaatctttcaccccctgtataaatcagacactgcctcctgaagctcatctataaaaccttctgcatttcactatggaagtggcaacccattttccccaggacccctctctctgtgcagagagctcttctctttctttcccctatgaaacttccactcttaacttcactctgggtgcctgcatcctagttttccatggccatgggacaatgaacctcgagtattaccccagatgaatgatgctgtttcacaatcactggttcagctcccttcttcttagggtttcacagctcggtggggagaataccacgcctcagtggtctggggagtgaggaacaaatgaagaattaatcagattttacttagaacgctatcacctgcctcaaccatcagatccatgttgggaatgtccaggcctcctctcttagatctatacccacttcactggacctgaaatcctgtgtttcccgatgtgttggtgtcactcctatgagaggataaaggagagaactttgctttctctccccactcacaccctgcacaagacagggcccaatatgagacacacactcgctcagtagttctctcatgaaggagggagggagtgacctcgagtgattctgccatctgtagtctgtgtaccctggccagtggctgtatcttcatatgcctcagtttcccctcagtaaaataggacacacaatgagaactaaaaataaaattctaattccccagtgaactgaaaggatggcctcttggccaagcggatcccagagttcctgatcatgacaggatgggaggttacacctcattacagcccctccctttggaagtttagaggtgacaactgactagcattaacgctaaaatcgagatcatgagactgacagaacagactctctgtggccataagataccaaattataaactcaacctaaggtcatgcaggcaagggctaagccacactttcctacatttaaagaataagctatgttctaacacagaattttctttctctctagcggctaaagtaacactagccttcgagataagcaatattgaaatgatcgcggctcatccaccaacactggctaactgacccctgttccaacagccacaactacacttcaattggacaggagactgatttcagtaactttctcctaataagagaccactgagcatggcctggttctgctggtatacagacacggtgcactgagtaccataatgcttgtttcatcttttgatgtataagacctaatttaatacatttaaatctgaattctccaccccaaagtgaacatggggtgcatgtagcatgcatgtttgttgatcacgcatgtgcgtgtacttcctttgtgagtatccatagctccacctataacctgttgaatatgtatacctggccaactcattcagcataaatctatcttccacattcccctcccttgaagtgcctgctattggtctctgctggaggctgcatcttctaccctggggaatggccagcctgcaggctgtaaccctgtgtaagaaataacctggttgggtgcagtggctcacacctgtaatcccagtggtttgggaggttgaagtggtagaatagtttgagctcaggagccagagactagcctgggcagcatagcaagatcctgtctcttaaaaaaattttagggaggagagtgaggatcagaaaaaatacctattggctattatgcttagtacttggatcatgaaataatctgtataccaaacccctgattacatatataacaaacctgcatgcgtatctttgaacctaagataaaagtttgttttaaaaactatctgggtgcagtggtgcatgcctatagttccagctactcgagactgaggtgtgaggagtgcttgagctcgggggattgaggctgcagtgaattatggtcccacctgtgagtagccacttcactcaaacctgggagacagagcaagaaccggtctctaaaaaaaaataaaaatagaaaaataaaatgaaaaatatatgaaataaagtctcctttccaaacgtacagatctccgatttttctgccaacaatgataaatggtcagtggcttgccatgttgtctgtgaattacttttaaaatattcacgatcacctgacctaaaggttggtaccaaggaaccgcctgaatacaccgtctctgattatttgcctccaacagagtgttccctgggcctgatctctggtggacaatgagctgctgggaacatcctctcttctctattcctcccctggggatgctgaccttcccttggagtctcctaagttccccagggcagtcggctaatgtcctagggagcttacctgtcttctccataccaagtctcatgtgaaggacgaggctttgcccttgcccagatgaggctctgggggctgagccctggctggctaccagctgcaagagccatggcccttggacagctggtaaatccttgttcccagtcagccctgcccaagatgcctcaacccagccccggcacaggcttcccagggtcacatggagtcaggatcctgggacaggggactggacaggggtttccagggctgagtttctgaacaggggcttcccaggggtcccctcactccaggatctgacatggtcctacaaggaacgtccatggggaggggacccaggagggggaactgacactgacctccccttactgagcctccccccaaccccatcagactgtccttcctctgtagcaagtgcctgcagggtctggatgcaggaaagaaattctgatctgtggaagtttgtctcccctgtgtgtgtcttgcactaaatgtccaaacccccaaatgggatgtaatgtagagggggacacaggcacagcccaggcctgaaaatcctgtgtgtgtgaagcagaactgacccccaacacccagagctcatgagacatcactgtgtacgtgaaactggccagttacttcttcattcacaagatctgtttttatgacttgtagggtgtaggatcctgtgtcattgttggtgacattctgtatcagcagacatgtattggggtatattgtctctcagcctctgtggcaggtcctggggtaattacttgagttcctagtacatatcctgtaattcccctttgtaccagttgtagccaagcctaaggcagattgtgggtgagtggaagaatctccttgccttctgcagcttcaacagtgacttgggcagtggtaggcaagttccagaaagttaaaagtgaggctaggagtggggagagagcatcagttaatactgggccctatgcattgaggtggaaagatggggccctaggtcctggacaggtctcttcatccctcagccttggagtgtgtgtgtgtgtgtgtgtgtgtgtgtgtgtgtgtgtgtgcgcgcgcgcgcgtgcgtgcgtgtcctactgggccaaggtcagcagcatgacctcccttccttcagtgcctctgaccttggcatttccctgtttggagtccttttccccaggggtctgcctggctccctccctactgccttcaggtcctgctcacattagggcatccttgggagaccccttccctgacacctctagagaccctgggtcttccctttctgacctttcgctgctgtgttccctccagggctcttgtcaatacttgacctcacattctagatacccttgcatgtctgtcttcctccctatgagagcatgagctctgtgagaacagggacttgtgtgatcttggttgcaccccagtgcctgggacaggctgcggactcctgtggatgagctcatgagtgttcccagggcccttcacaacgtgggatttattttccaatggctgaggttgttggctaagagctctgttggagttcaatcaggctggtgggaaaaatattagagatagttatagagatagacacaaatcttcttggaagaccaaaaagtttgcataactttggtaatagatctgactgaaggtggtccctttacctttagttaaacaaattaaagtagtaacaaaggaaggcagagtagtttgtctagccagcttgtttactcatgtgatcttaagactaaccattgatgtgccacaggtgcttaattgctttctacttgggaagtccacaatgtcaattaccctctaacggtgttgactcaagcctttgttaattaatcttactgaataaatatgagtctcactagctgatcaaggccatggtcacaactgtttataggactcagcagggagtctgtaagcggccctgacagactcagctggactggcaaagcaaaatatgtgtgtgtcagtgtacactattcacccgtcccccacagctggtgcccctatatgaggagtgctgccacagagctctgtttagtgtcccttgttttttttcttgagtattaccccaacttaaattgtgattattgtcatctgttttcaacattaactgctcagtgatgattcacttggaaaacattaacaatcgagattgtttcttcactaacaacctcagattatttagattttcctgttgtaatcccttcttcctgtttagtgtccaacagaagccctctgtccctctcaggtccccgttctctccaagaaaccccagccagtctctgtgctccctcctcccatccactcccagggagccctcccctcacctgtgagcagaagcgcctgccagggatgtgcactctgtgaggaggggctgagggaggccccatgggctctgctgtctgctttgtcctcctctgtggagaggagcttgggcttcagaaaataaggaggccagaaagtaaggaacaggctgagaaataatggggatgtgtcgaaaggtcacagatgccaacatctttgtcctatgcaatattatccataaaattacaggtttgagatatgcttaaattttcttctaacatgcattaaaataaacatataacttttaatagttatattaaattgtatttaatataaattaaatgctcttgtcagagctactgtgactgtcagctctgctgtccttcctctctctgtgctaagcctcctcccagggcagaagcacttcccagggccaggggtgggggcggggaaaggtaagtggcaatgaggatctgcacaggtagcctttccgcctcctcccctctcagtcctgcctccttgtcttcttttcctctttttctccaatctacatttcagttccttagaccacgctgtgagaagcaaggcttattgggacccccatcccttaacaggatgacctgtgctccccataagtgacctctgctgtgtctagggattggctctgtcagcacctcacagagagtccctggggcccccaaactcagtgttattttctctatgacacagaaacccctctgggtatgcaaggttttcctcatgttttctaatgtctgggaaggttggatttactcccagcagggaggtcacagagatgtccagggagtggggtcctagaaatggacaaatctagagctaaagcccaggtctacgattttcagttgtttttttctgcagtgctatgtgaccctaatttcctaggagtaactaaaatgcaaacctcagacatttgtagacattttatgatttttctctacagcttgtaccactgttattattatttgctttatgctttttcctaaataaatttactttacaaaacatccttgtcctagtagggtgcaggggctcacgtctgtgatctcagctgcttgagaggttgaggtgggtggattgcttgaggacgggaatttgagacaaaacatctttgtcctatgcaatattatccataaaattacaggtttgagatatgcttaaattttcttctaacatgtattaaaataaacatataacttttaatcatcatattaaattgtatttaatataaatttatatacaatacatttttatataataaattatatatataaatgtatatataatagtttttcttttttgagatggagtctggctctgtctcccaggctggagtgcagtggcacgatctcagctcactgcagcctccgccttctgggttcaaacgattctcctacctcagcctcccgagtagctgggattacaggcgcctgccgccacgcccagctaatttttgtacttttttagtagagatggggtttcgccatgttggccaggctggtctcaaacacctgacttcaggtgatatgccgcctcggcctcccaaagtgctgggattacaggcatgagccaccatgcctggcctatatattttatataattatataaagttttctataataaattttatataataatatataaaatggatatttatttaagataaagttattagttttatatatttacatatatttaggaataaatgtgttactgtgggagcccagtgcccaggcaggtagtcagtacatgatggttgtcattagggttaatactttggaattctggattttttcccaagagagtgtctacgctggaatattgggcttgtggctttctgctgatgtgcatgtgtgaagaagctacttccacttattaggacttgtgtatctgtctcgcagtttcactacctattttctcgtgatgttggtcaagtcgcctaacttttctgtgcctcatttacctaatttgtagaatatgggtaacagtacacaagtgtgagtgtgtatttcccaggactgaccactagagggcgtgaaggcaccggcacttactattacagcaatgggtgtagtagtgctcatggtcgtaaacatcattctcccatgaaaggaaccagggcttcctgggagaaataactgattccagggctggggccggaaagcacaagcggagcctggagcatctcgtgaggccagaaagtaaggagccggctgaaaaataatggagatctgtcgaaaggtcacagatgccaaccagaaggagctttgaatgaccaattttgagacaaaatgagcactataagaaataatgatagtaataaattccaacccataaatacccatgagttcctactaatataaataaataattgaatacataaatatataaggatgaagaaacagctttttcttacagcagaattccaattaatgaatgtagaaggaatgatcaaatagaaaatcactatttggctaacagcacagtcaattgtttgtaggcaagaattatcaatggactttaaatatgaatgggtaaaagtatgatgatgctacaactagtgagtaccaagggggaaaaaaaagtacgttgagaagaaacaggctacttccatattcccaaagtatcacttcaggagctacttattgattataatgggacaaatagtaacttacagtagagaaacctggcaacagagtctctccgaggtacaaaggctctcttcaggaaggaggtaaggggaaggaagaagaaaacactgtcctgcctcaattatttgctttccccattctcaagtgtacttcatagacattcaaagatatgtgttgatagtgtccacgatccacatggctctattatagtcatttattcacacatacattcagtgaggctttgagtgcctaatgtgtgcctgatatttgctagatggtggatgctgagaagatcaggtgtgctgctgtctctagggtgactgaatccacctgccccactttacagatgtggaaattaaagtgaaaaggatttataggattagttcactgtcacaaggtcactagccttaaagttacaggagtaaagcaagtttcctgacttgctagattttctgctgcaggtgctgacaatggtgagctccaataggagagaggacactcagagtgaagtgggagccctgaacaccctggattagccaagaggacatgccgggtccagctgtgaccgcacaaaggaccattggggatatttgtattctctttttcacttagagcttgaaatgaggaaaactaagtgcagaaaaccaagagtggaagatttttcacaaagcactggtaacatgcatcagaaaaccctgtgctgatgtctgtcacggtgtttctcactgaacggtaatagtctggctttgagtgtgttccctctacagcctggagttctgcgaggcagggaccaggtgtgattcatctttgtctctccagtgacagtacacagcaggctctgataaatatttcttacaaaataaaatggaataaaaagtagacatctgcacaggtgtgggatgactgagcagcagcagaagcaggaaaagtcagcgtccccagatcagctgatgtggtgttcggattctagataggggtgaggtgccaggatggggatgggggtcctgtggctctgctgccctgggggacacccctaggtttcacagtgcctgctgtggttgctgcactttgcttccccatgggaaagtgatcagagggtgtggggcttcaggtgaccccatgtgggaaatggccaagggaaggtggggtgggcggcacatggttttttttaaccaatatttgaaggtaggttgtatgaaaaggtgttaggcttatttcagcttatggggagtaggacagggattggtgagtgtgtatcaggtatattttggctcaggatggaaaagaactgtcacagtaacataaggtcttttgggaaattacatgtttactggcagagttcaggccagggctgggtgtctgaaaatacctgtcagggtcacttttatggttacaagggcagagcttggcttggaaccaggtttcttactaataccacatattaagtattataaaaactgtcctttgcaataggacattgctctatgatgcaggttgaggtccctctgtttaagtaattgtgggtggctgtgattctctcatctagtctgcgacttggacttcacctccatctgcagtccctctcctttgctgttgacactggtcagagttaagcgcatttactgacgatggtcacagggtggcagcactgcctctctggtattttctaaaacctcttcctggaactgagccagtctaagaggatgtcatgactaagaaaagggcactaatgaggtgaacagataattttttttttcttgtttctcctgtgaagtaacagagtggaggtgagcatggaataattgccttttagaaatggaagacaatggagagaagtgtttcgcaaaccttaatgtgttcacagatcccacacagatctttttattcaatacagattctgatttttctggtgaggcctgagattgtgcatgtctaaggagcttttggatgatgccattgctgctggttggcggaccacactttgagtagcaaggctcgaagatcatttagaggttaattctcactgcatctaatttatggatgaaaacaaaccaaggtccagagagagcatatacagcttgcctaacaaagccattccctaagtgcctgacttcttgcatttaaacccagggcttcagcctttgtccagttctcactccacacatcacacggtttgttcactgttgtgaacgacagttgtggcagcatctctttagtttaggaatccagagccccaatttcactaccctctttggtcttggctcatgctgtgacttcgaatagttttgcccttacttaaaatcttcagtggctcttttgtaatcacaagatcaagttcgaatatctctgtctagtgttcatggctttataacatatggtatctctttagtaaccttacctaacttccctgttttaaaattgtctcttgctgccatagccctccttgctccttcctgctccctaacaaactgtgttcacttctctctcagtggtagtgatgatggcatggcctctgatgttagactcatgtaacttctaatcccagatccaccaccaacattggcaagttgattcatctttctgaggataagcatcctcctctgaaataaacttagatggcggttgagaggggtaaataaaataacacacaaacccactctcatccctgagaccctcttcaaaactagcatataaaaatagctatttgaagaggttcagtgaaattcaaggtaacacagagaaggaattcagaatcctatcagataaatttaatagactgaaataatttttaaaaatcaggcagaaattctgtagctgaaaaattcaattgacaaaccgaagaatgcactaaatctttcaacagcagaattgatcaagcagaagaaagaatttgtgagcttgaagagataatatatgaaaactcagagtcagagagacaaaagaaaaaagaattaaaagaataatgcatgcctacaaggtttgattattaagctactcaaagagatacaagagaagggtgaaaaccaacataaagaaatgtaaaaaacaatcagaatataaatgaaaaattttctaaaatgctagctagtttttttttgagacaggctcttactctcatcacccatgctggagtgaagtggcacagtcatggctcactgcaggctcaacttcctgggctcagatgattctcccacattagccttccaagtagctaggactaaaggcgtgtgccaccaggccaggctaattttttgtatttttagtagagatggggttttgccatcttacccagggctggtcttgaactcctgggctcaagtgatccaggagattcactgccaaaaaggatataaccaagtcatatagtcataggttatctaaagtcaatgtgaaggcaagaattctaagagcagtgagacaaaagcatcaattaacttataaaggaaaacctatcagtctaacaccagatttctcatcagaaaccttacaaaccagaaggtattggggtcctaatcttttggcttcttaaacagaatagctctcagccaagaatcttgtgtagagtgaaattatatttcaaaatgaaagagagaaatacagtctttttcaggcaagcaaatgcttcaggatttgtcacggctagaccatcctacatggaatgttaaagggacttctaaatcacaaaacaaaagatttaaatagaacagaatagaacctcttgaaaccaaaaaattcaaatggcctataaaacaataacacaataagaaaacaaagtagataacgatcaacatgatgactggaacaaatattaacattgaatgtaaatgacctaacactccacttaaaagacacagattggcaagataaataaaaaatcacaaaccaaatatcagctgtcttcaagagactcacttaacatgtaaggattcttatagactcaaggtaaagagatgataaaagatattccatgcaaatggaaaccataagtgagaaggaatagctatccttatatcatataaaacagactttaagcaacaacagtaagaaaaagacaaataaggcaactatataatgataaaaggatcaatcaaacaagaagatattacaatcctaaatatatatgcacctaactttggagctcccacattcataaaacggttatgatgagacctaagaaaaaagatcaacacaaaacagtgagggtgtcctgggttttctttttattggacagcagtgtactagcctatcactttcccagtcaggggatttttggtctccccattcccctaccatgggttcatgccaaagtccatattttttattagtgtttggaattggattttttttttttgaggtggagtctcgctctgttgcctaggctggagtgtagtggcacgatctcggctcactaacctctgcctcctgggttcaagcaattcttctgcctcagcctcctgagtacctgggactacaggtgcatgccaccacacccagctaatttttgtatttttagtagaaacgagatttcaccatattgtccaggcttgtatagaactcctgacctcatgtgacagggaaacaggcactcagtgaacttcatgcgattgaggagttaatgataatgagagaagggctgtgaggggacagcactggggacaccagagcctgtgacgggctgagttgctgtgccttgggagatgcccttttgactgagccctgggaaggagggggtgtgggggcaggagctgcctgcagagggagtggcctcaggtgggcggccacctggctgcagggaagaggtgacagagttcgtgtgcagagcttggagggtgaggaggaggtgggttgaggtgaccttggtgagggtgaaccatggggggctgtgggccctgctgagggaggccagccagccctggacctacagggtggtttggtcttttttgtcccattcccagcatccactgagtggtgaaactctgcaggccagggaccatcccactggccagaaggagcgcacagtaggtgcccactcagtgcatgttgggctggacagaacctcactctgccccctgcccccagctttgggagctgcagcaaggtccctccccctagggatctccatgcctctgtctctgaggggtgagatggggagacttcaaagggccatctcagagtgtgggggatagagacgcagaagtgtgggggatagagggaggcctgggctctagacccaaaggaccttacacacctcctgagtcttttcaaatggtttcttctgttactttaaaaatgatgtaagtcatcatatttattgtaaatcccaggaatctaatcatgcgtaaaataaggtgtcttatccttgaccccaccccttccccaattaaatttccaggatgttaccactgtttgcagttggtgtgaatctctctttaataatactctgtttatctcacttgtcgttttacgccaaaatacccattgaattatattattgctgaagaccattcttttttttttttttttttttgagatggattcttgctctgttgcccaggctggagtgcaatggtgtgatctcggctcactgcaacctctgcctcctgggttcaagtgattctcctgcctcagcctcctgagtttctgggattacaggtgcacaccaccacacctggctaatttttgtatttttagtaaagacagggtttcaccatgttggtcaggctggtctcgaactcctgacctcatgatccaccctccttggcctcccaaaatgctgggattacaggcatgagccaccacacctgcccagaccattctgttctactgaatcatgtgtggtgggcacctcttatatcaatacatatggattttatcttgtgtttgttattggctcccctttttctcattgcatggctacactcaatgctttgtccacacccctgttcctgggttggaatcttgtgacagaaaatgaagtaacaaaggctaaagctttctaaagtggagtcaggagattgcaagacaattgcactttcaccagcaagagctcaaaccacagaatgttccaatagatttggataaacagctgaagtcagtattcaccagccttcaacatctcaactaggagaaccctaaaattaactaagcacatagaatggaatggacttgtgatttaggattccttctcagccaatgagctgcttctgaaaacaactttttgtggaaattacctgtaaagaaaaccctctcctgtgcttgtcttacagaacactagtcagggctgccctgattcagtggacccgaattgctattatttgtttcctaaacatatggtattttctgtgaccttcatctcaatcttttttttaagttactgggctgtttcccagttttcataatgacgagacattctgcagtgtttcatacacatgtcttttccccatgtggagtattgatccaggagctcattcagtcaacgcatgtttatgaagcatcctgtgccaggctgtgggctggtcactgtcttcagcagagagaggacaggcacagtcttgccttcacagagctcacagctcagggaggctcttagaagtgggatactggtcggagcatgtgcacattaaacatgatgaggtcaaggttgctatagggactaaaccacagtcccaccaagatcgcattgagttcctgtggtagaccagaggtcagggcccctaagatgtcctgagcagctccctctgctcagaagttttggttccacaggtgacacacctgagcacaggtgacccctgcagaacctgtgattaccacccaaagccaagagtgagtggtgggtgttctaggaggaaccgtcacctccatgggcagggttggggaagactgaggggagcaggtggctgatgactttggccagaaggtagggggatgggcaggtgtgcgctcatagggaagggaagagaagggagggcattgcaggcaacaacacaaaggttggaacctgccttcatggactgagaaaagcagggagtccacccaggctgcagctggggagggaagacatggggagcagtgggtctaggggagaagcagactgcgattgaccttggggactgggcagtgagcagaggtgtgttatgtgtgtctgtccccatcatagatatgaggaggggtgaggccgcgggtggcacctgggtcggtgggatttcatagtgcctgctgttccctagagcctctctgtatagagggtcagaatagatctgaggctgtggtctgggggaaggggctggtggtgcttaccatctctaggggtgggaggagagggatgaggatgcccctgagcagtgaagcctcaaggtgtgtggagccacagttgtctctcattagacatgtgttttgcgtgaggatgccagggcctggtggttattactgttgtcaagtttgcatgacaaggacccaggtatccagggatccagagcacagggcccctggtgaggggatgaggctcagatggggctgaccaggttcatgtggtcagagtgggagggactgatggagagacagagcctcaacccctcctgtcaggagctgtggctatgtccaggagagatgacaaggatgacccaggacattgagtgagtcattgagacattgaaggtgaggacagggcagagaggaccctggtgactgctgaaatgtaggatgtgaggagggctctgacccatgcaagttacaggacctccccacccccgagcccacagatgacccttaaattgggcatcctgagtgctgtgtgtgcccagcagggacactggataggctggacctgagtctctgtaagggcagcgctggtctgtaggaccagagtcttctctgtgggtgtgacgtgggcaggaattagcaagatgggggtgacaaggcttggcttggaggatctggtacagaagcccatgggcttggtcagctcagcttctcaggggctcagctggggctggaggagcaggatgctgtgctcagggcatgctccaggcagcgtgatgtgtgtggttccagggtcaggcacgggggtcaaaaattaaccatgaaaagttcccaccttctgtaggcagagaaaatggcctgattgtcagggtcagggagacttaccatgtggccaaagcaggctctcagcctcccagagaccacaccctgggtgcagcactcagctctgcagggtatggcaatagatgtgccaagaaccccaacatccagatgcatgcaaaaattttgcgatatataaaatagagcagatcaagtttccctgcaataacgttgttcctggttgtgtctttttcttgtaaactagacatggacatctttccagcagtctgttctcatctgccaccttcctgctgcagcacctcagaatgaacattcctgagacactgtccgtggtgctgacgaccaagagctatggaacagagtgtgatgtagaatcttctagttacctctgctctcctttcacttttaacaacagagcatcattaacaatgagaaggtggagaggtgttcaggatcttgaagtgacttctgtcttgctctcccataaccctgaagctgctgtagacattattgcagaaactgacaccacagtcaggatggccttgtccaggagcccatgtgcagtttgtagtgagcaaggatgagaaaatggtcttgaaaggggtgatggacagaacaggggcttttcaaaaatgtcacatcatcacccccagcatccgtgaatctgtcacatggtaagagaccttacagattaaatgaaggattatgagtttggaagattattgtagtttatccagatgggtccaacataatcacagaatcccttccttacaaatgagagagggaggtgggagagtcagagaaggaggaggagatgtggggatagatgcagaagacagagcggtgtcaagatgctgcactgctggctttgaagatggagaaagaggacacagccaaggatgcaggaggcctctaggaggtggaaaaggagaggaaacgcactctgccctggagcctccagaaagaacgcagccatgtgggcaccttggttcaagtttctgtgtcacttagcttgtgggaatttgtcacagcctcaacaggaacctacagaggagtcaccttgtgtgcaggtgggatccagggtcatttacagctaaatcctgatgtaaatattgcaggttgcttttcctacttcctatctcatggccaacaaccctggacaatggcagaacacccttggaaaccacggctctgtgctttagtggagggaccagcttgtttgtgggaaggtagcacctggtccaagtgaacctacatgagatcgttactctccccagggccctcagggaagggctgagaacagctggcccaggtgtgtggaggagctgcaggtgaggcagggctggaggggcctgtgggtccaggtagaggggcagacaggttgtcccatcgccatgggagcctgcacgagctttaggttggggaaccctgctcctctgacctggacgctcctgtgtggagaggaggcttgctcagtgagatccacgccagggggtaaattgggaactgatgggaaatgaggggctagagtcctgggtagtgcctgggaggaccttgctcaaggactgaattcttggtctgttcccaccttggttactctgacaacccctctctgtgtcccacggggataaagatctcctgagcagtggccattgggacagaggagaacctggtggccagagctaagcatccaggatcctggatttggggacaggcaagctcattgctgggggacagtgatagatacggcctccagggcctgggtgaagagagcaggagggctcaggacactggaggctgtgtggaggtcacacccacgatctgtaccacccatggatgctcctgcattgctcacctttgtgtggacatcagatggccccaacttttgcactcctgagacatctcatgcattcacagagggacccaggctggggctgtgcatggccttggtctctagggtagtgtgaggacagctgagcactcagctggctgggcaggactcctgcgaatcctgccctttcctgtgtagggtccaccccagcctgactcctaaccccctactcctgtctttccagggaagagagactggggttgagataaggtggagatatttttcctgtgtgacccaggagagaatggacatggagtttcaggtgagtttctgctaagttcccatgagcagaaaaagagccaatgagaggaagtttcccctttattcagatcctttccaggtgaccccgggtgggccataggcccattcactttccctgcaagcccccgcttcctgtggtgatgggaagccttcgccttggcccacccagagcccggggcagtctgttgaggtctctatatattcagcagggacccccatcccttcctgtccccaggcctgtgtctcctcaggactcagagctggttctctggctcaggctccatgtccttccccatccccagggctgggggcttcagggacgctccatcaacccacaggagcagctcccagaggaacctaagaagccacatctgctttgtggtcgatccagcagtaaatgtttgtgtcagagtgtagcaattccagtaaaaacagagaagaggtcttgacccctgaggccttctcagaacagggtctggcatctctctctgggcccacccagggctactctgggactgaacctggctgtgctcagggggttcctgctcccaggcccctccctcctctgctcaccacctcctgttattttcactgcagtttcctgaacttcagctcagccagatgccagtggggacagatcctgggtctccctggggcccaagggaccagaatatctgtggcccccactcacctcatagatgagagcagctgccctggtgctgggtaggggaatctgggcaggggagagaggggtgtcaggggacagggaaggattcctgctgtgtaggaattccagggctctcctcaggtgatggagggtcccagggtggggttagcacagggagtggatgatcctggccctgaacagaggcccagctcatggccagggcaggtctaaccttatccaagtcattctgggtagggtgggtttgtgctggggattgacagtccccctgccctgagcctgcacagctggggccccagtggaaatgggattgggaacggacagtcttacctaggagatggagctgtcagagggtccatggcctggggacagagacaaaagtgagcacgagagtgttaggatagctgggcccctcctgcaagagtgtgtgggggtcctcagttcttagagaattggggagagggagcctttctcaggttattttaggggtcaagtaagcaagtgaggttgaggaagtgacccatgacccagagcccggaggttagggctgacccggccagttggggtttcctgtgtgatgttttatgggatcctctttgcagccccagggatagggtcagaggcccctgggtgtaactggcaggagtggacaacttggggctggcttagtagttcccagccacacccagactgaagggacactcaccgggggtggaggctgggggctgctgctccctgaagtcactctgatcgctggccctaggaaaggtcagggttatttgtgaaggtgcaaggttaaaagtcacaaattggagttaaaataggggaccaggaaaggagcctatttccaagaggggtatggagacctcctttctttatggagttctgtggtaggaggggcccaggtgaggggagttgaggaaaggccttacaaagccacatctgtcctggccagaggggaaggactctcaggcagatgctgggccaggagaacattgatccagtgacacaggaaagggactgaggacccagggaaggaatcagaccaccaggggttgcctgagaggaagggtcaaggcaccagggggaaagcagggccaggcacatgtgcaggacactgaggggactgcatgcatcttggattctcctggaactcagtgtccctgctgtgaccagacactccactcagggctggagatgctgaaatgggacaatgatcttgtcttctgtctctgccctttggcaagagacataaacgacattccaggatatgccatattggggccccggttctcccttctcacagctcagtgtctgcagttaccatgtcagtcaaaggggtgctgaccccacccagcccgtccaggctgttccagtctccactatgtgataatgcccaggatcccccctcagatgccctctcactgggtggatggattcagtgaacagggggaggtaccaggtattgagcaccgctcccccctgctccaggcagctgtggctttgctgtgctaggaaactaggaccatgctcaggggcatggccttaattggactgaattcactgaggacaaagctgttgaggaagcagcccagggtcagcagctggtgaggaaggtgccatggaatgagagggaaggatccctggggagtcgggaggctggggagagcctggcactgaatacaagacagggtctccttccttctcgcctggggtcagcgtgaaggatgggagcagaatggggaaaagctgtggtacctgccagtttttcggaggagcaggaaacacacaagtgcagccaccagaagactcccaaccaggaccccgatcaggatgcctagagtgttgtcatctgctgaaagaagaaggcaaaggggatgaggtccaaatctgttccagggggaaccatgaggggccttgcagggcaggggcatggtcagggaggaaggaaatgccatggagcctgagtgtggtctgttgtgctgtcctcatagctggctcccttgctctccgtggttgcaccattttctgtgtcttaggcttgaattactgggatgcatcaactcctacattctcccacaggaagcctgcacctcatcctgctcctgtgttttttagtccctccttcctctcacatcactcctcttccccctgtttctttttttccatcccatggcagtcgtaaagggcaggcccttgctgccaactcaatgctgatgagcagggatgatgttcattgactgttttcaggggccttccacatggaaggcacagtgggaatcaatctacctgcagcttttctcaccctcccattgccttgagggagaagggtatgtgatattgtgaaatacgtatttggtgttcatcaccattgatatggttaggctctgtatccccacccaaatctcaccttgaattgtaataatccccatgtgttatgggagggaccttgtgggaggtaattgaatcatgagggtgggttttttccatcctgttcttgtgatagtgaataagtctcaggagatcagatggtttcataaagggaagcttccctacacatgtcctcttgcctgctgccatgtaagacatgcctttcaccttccatcatgattgtgagacctctccagccatgtggaattgtgaatcaattaaacctctttcttcatacattaccaagtctcaggtatgtcttcattagcagtgtgagaatggactaatacagtaaattggtaccagctagtggagtgctgctataaagatacctgaaaatgtggaagtgactttggaactgggtaacaggcagaggttggaacagtttggagggctcagaagaagacacaggaaaaaagtttgaaacttcctagagacttgttgaatggttttgattaaaacgctgatagtgatatggacaataaagtccaagctgaggtggtctcagacagagatgaggaacttcttgggaactggaacaaaggtgactcttgttatactctagaaaagagattggtggtattttgcccctgccctagagatctgcagaactttgaacttgagggaaatgatttagggcaactggtggaaaaaaaattctaagcagcaaagtgttcaagatgtgacttgggtactgttaaaaacactcagttttatgtatttacaaaggtatggtttggaattggaacttatgtttaaaagggaagcagagcataaaagtttggaaaatttgcagcctgatgatgcaatagaaaagaaaaatccattttctgaggagaaattcaagccagctgcagaaatgtgcataaacaatgaagagcaaaatgttaatccccaagacaatggcaaaaatgtctccagggcatgtcagagaccttcctggaagccccttccatcacaggactggaggcctaggaggaaaaaatgtttcctgggccaggcccagggctcccctgctgtgtgcggcctagagacttggtgccctgcatcccagccactccagccatggctaaagagggccaaggtacagctggggccatggcttcagagggtgcaagccccaaaccttggcagcttccatgtggtgttgagcctgcaggtgcacagaagtcaaggattgaggtttgggaaccttcgcctagatttcagaggatgtatgaaaatgcttggatgtccaggtgaaagtttgctgcagaagcagagccctcatggagaacctctgctagggaagtgttgaagggaaatgtggggttggaaccccgacacagagtccctactggggcactgcctaatggagctgtgagaagaagaccacaatcctccagaccccagaatggtagatccactaacagcttgcaccatgcacctagaaaagctgcagacactcaacgccagcctatgaaagcagccaggagtggggctgtaccctgcaaagccacaggggtggagcccaaggctatgggagttcagctcttgcatcagtgtgacctggatgtgagacatggatacaaaggagatcatttcagagcattaagatttggctgccctgctggattttgggcttgcatggggcctgtagcccctttgttttggccagtttctcccatttggaatgggtgtatttacccagtgcctgtacacccattatatctaggaagtaactaagcttgcttttgattttacaggcttataggtggaagggacttgccttgtctcagatgaaactttggacttggacttttgggttaatgctggaatgagttaagactttggggaactgttggaaggcatgattagttttgaaatgtgaggacatgagatttgggaggggtcgggtggaatgacatggtttggctcttcttcacccaaatatcaccttgaattttaataatccccacgtgttgggggaaggacccagtgggaggtaactgaatcatgggggtggattcttcccatgctgttctcatgatagtgaataagtctcacaagatctgatggttttagaaaggggagttcctctacacatgccctcttgcctgccgccatgtaagacatgccttttgccttctgccatgatttcaaggcctccccagctatgtggaactgtaagtcaattaaacctcatttttaaaaaaattacccagtctcaggtatgtctttatcagcagccaagaccagctcggtcgcggagatcctaacccagcagtgctagaggaattaaagacacacatagaaatatagaggtgtgaagtgggaaatcagggttctcacaggcttcagagctgagagccccaaacagagatttacccacatatttaataacagcaaaccagtcattagcattgtttctatagatattaaattaactaaaagtatcccttatgggaaaccaagggatgggccgaattaaaggaataggttgggctagttaactgcaacaggaacacgcccttaagatgcagattgctcatgctattgtttgtggcttaagaacgcctttaagcggttttccaccctgggtgggacaggtattccttgccctcattcctgtaaacccataaccttccagcttgggcattagggccattatgaacatgttacagtgctgcagagattttgtttatgaccagttttggggccagtttatggccagattttggggggcttgctcccaacagactaatacacccattttctggtatgtgactctaaagtccttagaatcttcaaagtgatgtctttttcaagctaataattgactgatgactggcagcccctaggcaacttcagaatgaggctggtcactgacccaggtaggattagagggttgggactttcagcctcacccctaatccctggggagggacctggagtttgaattaatcaccaatgaccaatgaatcaattaatggccaatgattgaatcaattaatggccaatgattaaatcaatcatatctatgtcatgaaccccaaaaggactgggtttgaagagctgaacccatggaagtttctggagtgtggtgcatctggggagggcatggaagctccacaccccttcccacatgccatgctctgtgcatctcttcatctgcatcctttgtaaagtcctttattacaaaccggtaagcctaagtatgtgtttccctgagtcctgagagctgtttgagcaaactaatccaacccaaacagggagtcatggaaacctcaatgtgaagccagtcataagaagctctggaggcccagacttgtgactggtgggaaggtggtggcaattttgtgggactgagccctctgctgatatgtccaggtagatagtgtcaggatggaattggaggacacctagctgatgtacggtgcagaactgattggctgctgggtgtgtgggagaaacccccccgcatcacatttggtcacagaagtgtgtctgtgttgatgattgttattgtggagtgagagcagaggaaaaacacagtttgagtttttccaaacagggtggaatcccatctgccaatttagaatctgaaacttatagtttcagtacttcaattaagattgaagtacttcaattcagtacttcaattaagattcagtacttcaattaagattcagtacttcaattaagattacagaactggtaagtgaaagtgatacaacaaaaatgtaaccaaagtctgctcaacttaacagctaataacaacaaagttcataaaaataataccagtcgatattgatagcactgattgagccctggctctgtgcatgaccttgttaagggctttaatcgcattaatctctgaataaatatcctcacaaccaccctgagatccaggtgtttgtaacaattctacagatgaggaaactgaggcccaggaggttgagtgtcttgcccaaggtcaaatacctggtacctattgtaaccaggatgataactggatgagtctaatccctgagttcttacccacattgctccccaggctctgaaggaatctcatccttctcattccgtgtatcattttacaccccccctccctcctaggaaaatatacaaggaaaggagtgagaggggccgagggtcactcacattttacagtcagcttgagggggtcgctcctgttggagctgactgggttggagacctcacactgatactccccagcgtcctcctgcctgatggggtctatggtgagcatatggttaaaccaggacagcttcatcctcttcgtgacctgcagacgctggttgttgaaaatccactggaaagaggttccagtgttatttgtgtggcaggtcaggaccacggagcccttctctgtgactgtggtgctgctggcttggatggagggctgagccactgactctgtggatagagtgaccaacagaaagtgtcttggggccatgctgcatcctcagagatctcagagtcaaatttagaacattctcctgtgaataaaggagaaagatgaaggacagggaggagcagagagaaccagagacacccatagcagcgagcagtagggactacagtgacctcagagaccccagggaccaggaggacccagctgcctcagaccaggaccagggagccctgaaaaccctcccacagatgagcggccccagagtcacatgagatgcaatacctggggtggctttaggagcaggcagtcagagaaatggaacatgggtctcagcccctaagggacaaggaagaggtgtggccagctcctcctaggatcctacatccaggacccagtctgtaaagaggttatgattattcctttcttttttcattaattccctccctccttcatcagagaactactgagtgtgtgtctcagttgggccttgtgcaggtacagggtgtagtgggaagagaaagctgagtcctttccttcatcctcccatgggagtgacatcaacaaatcaagaaattcatgatttcacgtccagtgagggaagaaatgtggatctgatgggagaggcttggacaatcctggcattgagtctgatagttgagacaggtgatttcgttctaagtaaaaactgactaattctccatttgcccgtcattcctcagaccagaatctccctctctgagctgaggatgcccaagaagaaaggagctgaaccaacatctggtcctggggtccacagatgccccacggtggtggccacgaccagattctgggctgcagacacacggtggtgtgacgttgagcactgacagcctgtgtgatgctgatgcaatttctctttaataaaatggggtaaatgtcaatggtccctggcttgccatcctctctgtaaattaacattaaaatatttacaattacctgacctaaagcttggcacagaatagctccaaataaacatcatctattattattttactccaaaaaaaaaaaaaaaagagttctctgggcctgattcctggtggagaaggagcggtccagagtgtcttttctctgctttccctcctcctgaggacagtgcacttcccgggacatcttttaagtttcccatccagtttaatggcctgggaagtttgtttgtctgtcctctccactctgactctcaggtgaaagatgaggctctgcccttgcccagatggggctctgggggctgagccctgcctggtgaccagctctaggaaccacggccctgggacagctggtaaatcgttgctcacaatcagccctgcccaggaagccacaacccagccctggcacaggctccccagggtcatctggagtcaggatcttgggacaggggcctggggcaggggcttgaagggctgagcttctctcagaggatcctcaggccaggccctgactgagtcctataagatctttctcaggtcatgtctatgaggaggaggccaagcggggttggactgagactgattttcccccgctgcatctcccgcatcagactatccttcttgctgtagggaatttccacggagtccggataagggaaaggaattctgatctgttatagtttgtctcccctgggtgtgtcctgcactaaatgcccaaaccccaacatgggacgtaatgcagagggggatgcaggcacagcccaggcctgacaatcctgcgtatgtgaagcagaactgacccccaacacccagaggcacggaggaatcactcaccgtatacacggagatggtgagatgcctgttcaatctgagaatttctgtatgtgacttgtagggtgtagtatcccgtgtcctctagggtgacgttctggaaatgcagatctccactgggtgatattgtctctcgaccgctgtatgcaggccctggagtcctaacgtgagtgtctattacatatgctgcgattagctggttgggctccaccgttttccctttgtaccagccatagctgtaaagattctcgggcagataaaccacagagagatgaacattctccccttcagcaacttcaaagggcgctgatgcaataaagagccaggcagtggtgggtgcgttccagaaagttaaaagtgaggctaggaaagggagagaatatcagtcaatatttgacctatgcattggcatggaaagacggggtcctgggtgcaggtctcttcacccctcagccttagagggtgtgtgtgtgtgtgtgtgtcctactgggtcaaagtcagcagcatgaccctcattccttcagtacctctgaccttggcatttccttgtgtgaaccctctttcccaggggtctgcatggttccctccccactgccttcagttcctactcacacaagggaatccctgggagacttctttcgtgaagcctcctctagagaccctgggtcttccctttctgacctttcccagctctgttccctccagggctcttgtcagcacctgacctcacattctagatctctttgggtgtctgtcttcccccccatgagattgtgagctctgtgagggcatggacttgagtgatgttagttgcaccccagtgcctgggacaggctgcagactcctgtggatgagttcatgagcgttcccagggccttccatatcctggggtttatttgctaatgtctgaggttggcagatgaagacagagtttcatgccctggtggtgtttttatttaaattgtcactgtgatatagttttactatcattttcaaaatgtagtggccactgacaatgaacttgaaaacatggaccaactgagattgttttgccccttggcaattccagttcacttagattttttggttctccttagacgctctctcccctgagtctctaacaaaagccctctgtctcctctcagagccccatcctccccaggagaccccagccagtctctgtgctccctcctcccacccactcccagggagtcctcccctcacctgtgagcaagagcccctgccaggggatgcattctctgtggggacaagctgaggggggccccatggtctctgctgcctgctctgtcctcctctgtggagaggagcttgggctccaggaacgctctagacagggttactgtgactgttgtctctgctgtccttccttcctctatgctgagcttcctctcaggcaggagcacttcccgtttatgggcaagggcggggctctgcctacaatgtctctctgtcccctcccctctcagtcctgcctcccttgtccctcctttctccttcctttttgcctatatttggttccctaggcaaaactttgagaagcaacgctgatggggtcctcataacaggacgacccactctccccagtactgacctctgctgtgttctggccttggttctgtcacagccggtagattatttccctttgtgacacacaaaaccagctgggccctgggtctcctcatgctctccagtgctccaggaaggcagaatgatgcccagcaggaaagtgacagaggtggctctgggggctagaaaggggctcactgggtgatggctgggaaggacccacccgctatcttcagtgtcaccagcctggcctctgacccagggacagagacccaggcctggaggtctcgggaggatccccagctcctaggtgtggagggaggtgtcctgtgtgtcctgggaagagaggactttgatggaaggaggtgggaggctctgggttctgctgtccttggtgaaggtttcagggggaccctctccatgtctggggtctgtgcccccagcttaactctcattctctttgcaaatacatatattttgtggatctgcagttgcctgaactgtctcatgtccctaaatctttgtatccctttttacagaaggtcaggaagggtgtgtacatgagtatgaggactatctgatcagggcgagtgtttgtttcccaaagatctctttagatatggtataatacataagataaatgtactgaattagcaattttaagtgtagaattaaatgatactaattctattcacaatgttgtacaaccatcaccataattttttaccagaaaatcttcattataccaaatggaaacttcatacttttaatcaataactccccacttccccctgccccacccactggtagcctctgatactatcaatctctgtgaatttgcctagtttacatgtctcatataataaggaattatatacgtgtattatttttttctggattatttctcttagggtaacacttttaagattcatccacgtcgtagcatatattacagcttctttcctatttatggctgagtaatatcccaatatatgtttatacctcaattttaattcattcatctcttaatggacatgtgggtggtttccacatttttgctattgtgaaaaccgctgcaatgaacttacacttggaagtatctgtttgggtttctgtgttcatttctttgggggtacatataggagtataaatatggggtcatgtggtagttctatgtttaagtttttgagaaacagccaaactgttttccagtttgctgtgctattttatattcccatcagcaatatacgagggttccattttctctacattcttgtaaacacttactatttaatattttttaaaacttatagccattctagtaggtgtgaagtgatagctcattgcagttttgattttcatttccctggtggctgatgaagttgagcattttttcatgtatttactgacaattttaatattttttagagaactatttattcaaatcatttgctgtttaaaaaaaatgggttatctttttattattcagttgtaatagttctttatatattttagatacaagtcccttatggggtacatgatttgcaaaatttttctcatattctgtgtcttctcactttcttcatggtgttctttgaagcacaaacatttttaactttgatgaagttcacttatctatttttaattttgttacttatgctcttgatgtcatattgaagaaaccattgcccaatccaagatcattaagttttactcctatatgttcttctaatggtttgataagttttgctattccatttaggtttttgaaacattttgagttaacttttgtatgggctgtgaggtaggggtctaactacactatctcgcatgtggttatccagttgttccagcacaatatgaagaggctaccattctttccccattgaggaatcttggcacccatgtcaaaaaccaatgggctgtaatggtgagggtttatttctggactcttgattctattccattgatctctatgtgcattcttgtgccagaagcacactgttttaatgattgtagtgttttagtaagttttcaaattaggaagtgagtcctccaatttttttttccagattgttttggccattctggggtgacttttaaaaaagatgtagttcaatggttctcaaagcaggagtggttcagctctccttttttggcagtctggagacctttttaggaccttaatctaagtagataaattattcccactttcttttctgagttgctatgttacagtgtatattgacacccatgaaataattgagagaccctggaagtgcttgcctacatagtgagggacaattagttccatgatcatgggcacagaagattttgttttgggaaacaattttgttggtggagttatattcatgcttactcttttatttgtcttcatagcctgcatctccttcagacttcatatctgtttattttcttgtttgtcctctggggtttgggtgttgggtgaccagtcagctggagctggaggaggtgcttagcaaggcagtgaccctggttgggaggagcagggctcagcagggtgaaagtagctgggccttgagtcaggagtggcatctggaaggcctgactgtaagggtcagaagggccagcaggtgggtgtcctaggcacaaacggtggctgctgctgtggactggaggaaggtaagaggccccgagtattccatgttcttactggctccccaactgaggattcctctcctgggctggtgctgtcctgcagcagggaggggttagacagggacggctgcacatcaggccggagtccatgtcatcctcttaggcactgtcactacagattgaggattctgttcataagccaagcctttgcacaaggaagggacccgggctctcaaggaagagcagctcctggtcagacctccatctccttctctctcattgcctgaggcctcaagcttggtctacctggcacaggggtctggatcctcctcccagggttggggtcttactgagctgggcacctgcaggtgggagaagatctggaggggccccatctgccttcaccagattgatgttgagggtccctgagtcctgcaccactatcaggtgctgagcaacttccagtgtcagtgacaaccaccccatggtggaagcagaaccacctcgtgagaaagcacctccaagcctcagtgcttgccatgtgtgggaatttgctggtttcagttgggggcatgttggtgggtggtcatgaattcagggccggattctatgctcacagtgcacatgctggatgtggtacagaccccaggcagggctcagtggggtggttttgggtgtgcacaggtatcttttctggaggagctggtggtgatttggctcccagaagttcctgagctctgcagactcaccaagcactcaatatttgagtgaacattgggcgagagagcagaaggtaagtgtcagggcatcggggttggtgcctctgggaagaggaggaacattctgggaacaaagctctcccccggcttacagggagcttcccatcgctcctgccttgaggatcagggaaactagggcctctgctcttccaggggctgcttgcaggcagtttgctctgggagggggtgacccaggagttgcctctcattttgcatttgagatttaaaaggagaagggacagtatatcttgccaggtcacaaaaattacaggcatcatattgactgaagggcactcctgtcatcactgcaatataccagaatggtcttttaaaaaaataagtgatttaggtttaccagcaactgtaatgcttgttttattcttctagttcaccgttaatgtcacttttgtagttttagcactggcaatgttgattttatgttgactctgatgattttaagctttcatttgttcacatagagatcatcttctttctgaatattaatgcattttttctctatttctactggttattcctgtacatagagtagagaatcacttttcccaaggaggtggaaagcttctgactaccaaaaaaaaaaaaaagtgtcaaaatgctttaaagtcagtaacttaaagatcaaatccaagagtgggcaacagattctgcccagggtctgaaaggtggagaggtgactggtgaggatgtttaaaagacctctcctctctactccctaaatgggggccatccagtgttcttgaggttcagagaaggcccagggctggggcagcagggcactgtcagctcccagctcccaggggccaggagtaagaccccaacactgtccagacactgattgcattcattttgggggagagtagattcttatttaaagaataatacaaaagtctacaaatatgaacataaacagaaattcctttgctacaattttccccttaataagacattccttcctaatgacatatgtgactgcattcatggctgagatgttttctaggatggtgagagcatcagagtggactatctggtgccttggggtcatgcattttcttcttccaatgtctacaggatcccccatgtcccactttgtagtgtaactcagtgtgtgtcattctggtttttgttgtatagatccttggaaagcccatgtcattcctgctgtgaggtacaggcagccaaatggcatcatctctaaacatgccttctcctggtacatcaaattatggaataaatgaaagccattttgacagatattgaagatataagtttctactcttcccacacatgcttctcccaagtgaaggattttactggtgaattgttattagagattagtgtggatcagtgactctgccaggggaaattttgccctctaggggacatttggcaaagtctggaaacattgttggttgtcagagctgggggagggagtcctgctggcattgagtgggtggatggtgctgaacaccctgcagttcacagagccccaccagtttgaccacccaaatgtcaatgctgaggagtggagagccctgctgtgccctcccgcagcttccctgaagcttcccctcacctgctcctcccatgtctccccaccacttccccacttcacccgcctccttacacctcagtcccctccacctgaactcaccccttagtccaaggccagccctgatctccgctctcctggtctccttgctccttagcaggaggcgcccactagatggcgcccttgcccttactggagctcaccgtctccctttccaccctgagacaaatgtggctgcttttactgccacaaccccagccctccacactctagatttgctcagggagcagctcctggacagacctcagggaccccagggaggagcctcactctggagattttgatggcatggtctttgaacttcactgttacccccagtcaggatccaggatgttgggagtgcatgattctgcccggtcccacttcagcaggaccccactgctgagttgtctgtggggacccgggcctctcatctccttcttgcattgcaggagagggatcttagcactgctttcacataaagtcagataatggaggagtgcaggtgagtttgggaaggtggacatgaagagaggttgtgtccctagaggtggcagcagtgagaggatgggcaggtgggaggaacacagcccatccagggttgccagccatattaggagcgacagcctttcctctaagcctccagcctttttcctgaaacattccagaactttccacttcagcacttcccactgaggctcctcaggtctgtccctgagctcccagctgagcctacctacccatctgaaatcctgagtcctgtgtcaccctcgttccccattattctgtgcagttctgtgggacgcccagctctcctgacacccccagtcttcagaatggccatcagcgctgtcgctgtggcaccagggtgactgccgcctggaggctgagtcctggcttcctgacagctgtggggcccgctctaggctcccttgtcctgatcattcatcacctccaggatgcacagcagctgggccagggggaggagcagggacaggtgtcagccaccctgtgtgtctgcaagtcaggctgggggtgtgggaggacgccaggaatgactgaactttctgatttagagggtgagagcttgcactgatggaatttgggatttaataggaaaagcatagcgttttcctattttgtaggcagggtggctggagtttggaatcatagattcccctgggatgtcactgtggacctcagtcccacccgttaggggcacagatttcagaatccacaccctggggcaaagcaggcatgggaggctccatcagcctggccagggctctctatttgtgcagctgctgcaaggagatgtgcactctgatgggaacagtgctccctcctccttggggggcagtatctagctccctgcagcccctctccctgcaggccctgccctctctgaacctcaccttccccaacccgccccccgcaatcccatctcagctgtaatcccaacactttctcatccattatgggtggactgcttgagcccaggggttcaagactatgctggctggacaatatagcgagttgttgtctctacaaaaagacaaaaattagctgtgcatggtggcatacacctgtagtcccagtcactcaggaggctgaggtgggaggattgcttgagctggggaggctgagttggcagtgagttgagattgtgccactgtatacttcagtgtaggtaacagagcgagaccctgtctcaaaaaataaaagtaaaaaaaaaaaaagaaatatggaatacattattgttaactctaatcaaccatgctatgcaatagtccaccagtaataccagtaatagccaataatgaattatctgaaaaagaatacaatttattcttagctatctactgctaaaatttttaagctatcttttatgatagctgaaacaaaagaagtaaatttaaccaaggaagtaaaagacctttataatgaaaactgtaaaacattgatgaaataaattgaaaaagacacacgcacaaatagaagatattccatgttcatgaattggaagaactgatattgctaaaatgtccttaccacccaaagtggtctacagattcaatgcaatttctgtcaaaacaccaatgatattcttcgaagaagtagaagatcctaaaattagaaaccacaaaaattcctaaaacctgcacaaaacaccctgagttgccaaagcaatcttaaacaaatagaacaaagctagtggcattacacttcctgacaatcaaagcatactgcaaagctatagtaaccaaatcagcatggtcctggcataaaaacaagcacatagatcaatgaaacagaataaaaatcccagaaataaacccatgcatctctagctaactgattttcagccaaggagccacatgcacacaatggggaaaggacagcctcttcaataagtggtgctggggaattggatattcatatgcagaagaatgaacctagaccctatccctcaccatgcacaaaaaattaactcaaaatgtattaaataaagacttaaatgtaagaactgaaactatgaaactactagaagaaaatatagggggaaaatccatgacattggtctaggcaaagagtttttggataaaatctcaacagcataagcaacaaaaccaaatataaacaaacgggatttcatcaaactaaaaagcttttatacagcaaagaaaaaaaaggccagcagagcaaagagacaacctacaaatgggaggagaatatatttgtaaatatatacatatatatttgtaaatatatacatctgataagaagataatatccaaaatatataagaaaattatgtttctgtatagttttatctgactgggatacagaggccacatccacagtcccatcctcaaaggccacttgttcccaaaatgtcaagcacatccctcaatgatccatcatcaacacctatgtctgtaggatgaagggtgaatcatgaagcactaaaaaggaagaaggaagccaatcccaaaacaaaatgatgcagggtctggaaagtccaaagcattttttttttttttttactgcatcttcctcctttcttctccacattcccaatcctcactattgattaacaaaacaaaaaaaactgggacccaccatcttccctactgtcaggagatctagcgagattgtttgagtcttagaccaaactttgccataagccaaatttctggctgactttacaatgatatgagctagcacagtctctttttctgccagtcaacttgtgctcggttttatttgcaaccaaatagaggtggtaaccaaatataggtgaccctaaaattagtcatcaggatgaaatcctaaaatgtgcaacaaactgggttgaattcaggattagtagcaacatctctgttgtgggcttgaaaagggggcacccttttatgcagtagcaaaattgctaaattgttgtttgctgagtctttggactctcatcccggattttctatgaccattcaaacagggctgcaatgaacatctatggttgtttagcttggcacacttctacatttctatatagtaatatctagaagtgcatttgctcaatcacaagatatgcacattttataattgactgctatcgaactaccttaaatagccttaatttgttctcaacattgtttaacagggtctgtttaatgtcctacgtccagcaaggacagtatcacttttcttaatatttttcaaattattggaccttaacaaatacttaatgtgcaattaattgattcctttgtattcccatgccttcttttatatgtttccttatagtacacaaaaccacattattgtttctttacttgtgtcattccaccctggaccattcctatctaaactataacattatgagagagagagagagagaaaacaatatgaaaatataaattgattaatcaaaaaaatttaaataggacaaatcaggaagacacaagagagattttaaaattattcagagaataccacaatagctgtaccaatatattttaaaacttagatgaaacggacaactatctcgataaatgtaaattaccaaaactgactcatgaaaaaatggatattatgaatagagcaataatcagtaaagcaattaaaaagacagttgataatttttatttactgacaacaataacaaaatttcaggtcctgatatttttatggtgaattttaacaaattttcaagctcctcctcaaccaattctcagaaggtttaaaactttaacaagaaaacactttctaacacattttcagaagctgttatagcatgataccaaaaccacacaagaaaattatagaccaatctcacttacaaatatacatgcaaaatcaaacaaaatcttagtgaaccaaattcagaattaataatagcaaacaagcaaaatatgttatcatacgtatggcttatatcaggaatgcaagtatgtttcaacatcagaaaatacttctccacattaacagactaaaggagaaaaacgcttgtttaattatctcaataggtttttagagaattttgaaaattttataaagttatgcgtattctgtaaaattgatgaaatccaaccttgatttatttttaaaaattgcctttcctatagaattataggtaaaggaaacacatgcatcctcacagagctacttcaaggctaagttacttcccataagtaacgtatcctgtaatgtgtgcttggcacatattcaatactaaacaaatatttgcaaatcctcaaaccacttctcgctcaaataacccacctttgtcttttgcctttatgttagggttgattttctcaattgtatcttggagatcctttggtgggtctttcagcaattaccctgaatttgcttttctgtttacaattttaattcctgggaactctttcttgttctctgactgcacccttttcatgagagttcagccatcaatcctccagaaccccaccccccccgcccccccaaaaagcaataaagatgtctaaaagcttccttctgggctttcgaatgatgtttaccccaggcatttgttctattcgttcatcacccattttccctacaacttgcctacacttgatatcagatttttatttattagtcacctatcttcttcattggcccattttcctattttgccactggttgttctcaaatgtgttatgattcctggttgtacagtcaagtggttgataatcttggatatacgataaagatttgctctgtagctgtgtgtaagcctatataaaagcttttgtatttttcttcttaaaaaagacaaaagatggttgggaagatccctccagttcaccagttcgaggctgcagtgagctatgatagcgccgctgctctagcctgtctgtctgtgaaaaacaaggggggcggggggcgggggggaagactggagatgtaaatctcccgcagggccctacccgtatccgcaacaggtctctaacaggaacagcctcaggcctgtgttggaacaaggtaggttacagaaatctggaagccagatctgtaacttcagggtaaggactggctctcagggctgatcccccgggctgggtgtcccagaggcacccgcccccgccccttccccaaggcaggccaggacaccttcactcctctccttaggctccccacccccttctcctccccactgtgcctcctggagtagcggtggcggtgccacaggggagcggggcggggcgggctctgagggcaagggggatgggccccgccggggtcactggcggccaccctggaaactcgacgcaggccggcccttctagtgaatcgtcccagccacagctggcctcccagccgcgcttggggcgcctcggggcgcgaatggtgcaggttggggagactcaccacgcaccgtcgggggtcggtccggttattcctcaccgctcggctccagtgggcgcgcgggcctctcctcctcagttcctgcgctgcagtccctccctcacccttcgcagcttgggaatccaactgtgtcattccgacggagcgccgtgaggacctccgagggtgttagcgccaagtgatctctgtccagcgctctgaatatccaagtaaaggagttcaatgaagggcgggtcaacggaggagaaaccgtgactctctcaagggagcccaaggcctccttgtctaattagtgacgcgccaatggatggaggctcttcccaccatctcttcccagcatccagtgacaccaccgccaagggacgggctcggcggaacctgcaggaaagaagcatcggctgagcctgactgcagcgctgtgaagagacaggggaggggatcagtagttggtcccgcgcccaccccctgtttccgcgaggggcggagttgactggccatgcaggcagagggcgaaatgtgaaattccactactcctaccgtttttccctgacccgatggggcggagtgtcgtcaggctaagttccctggcggtaaggtggggagattgaggcgcacacctgccgaacggtaacgcaggattagctaaggcgagctcaggacagaagcctcccgaggagcaggagggcaaaataataaataaataaataaataataaataactcactccttggtctttatttgcggcaggaattcagaaggtgaaagcggggccttaggatctttctgaccttttgggttttaagcaggaggtgtcagaaatgttaccacagggctagctggcttgtggccagcaagcgttcacaatgccctcgatttttcatccctctctgtgggttctttttttcattgtaaggcagaatttctacgattgctcacccactcagagaacctgagctggtttagaccaggtgagacaggctaggtttaccctggtgatgatgtgttgttgccatggcgatcctgcccagtaccagaggccctgcagattcagatgcttggtgcctgtgcttggctgaggggccaatgggtgaagctgccatctgcgggatgatgactgaagcctctaagtcagaatccgcccaggctgagccttagggcagctccatggagcctcggctggcctgggatagagagtccaccactgtgccagcccccagccactgcctaggtcctgtgctgagagccccttgtccagggaaatggcgtccagtggaaaagggaccacccccttgcccttcactcaaggcaggttggtgacaaccctgaagctaatccgttcctagaggagctgcttctgggtccgagttttctctgcagcagagcagctccctggatgggatctgttcaaagtccgcctttcacgcggaattttccgtccttgcaattttccacctccaccactaggggatcctctctgaccgcctcatgccggctctggcctctgagcaggggtttctcttctgcatgtgcgaccttgcgcatgcctagtggccttttgggacctagagctgctccacaccccgatggggttacagagtgcctcgcctccactccaccccaccagggttccttccctggctgggatgggatttcagaagcgccgaggaacagcccagacaggtgtgggagagtagccaaggcccctgtcccggggtggccaggacagcggtggcctcgcataggacctggctgggctgctgcaatcagtgtcctgccccttggagagcaacagtgaaaacaacaagactatcttcacccaccttaagaaagaacagaaccagtatccccaactctgctgtgtatcccaacccaattccattccccaccccactctcagtagccaatatgcaaaatattagaatactcttactgttattattttcaaccacactctgcatcctgaaaaaccatatatttcgttatgtgcttttaaacttcttgaaaatgaaatactgaggctgggcgcagtggctgacacctgtaatcccagcacttcgggaggcggaggcaggcggatcacgaggtcaggagatcgagaccatcctggctaacacagtgaaaccccatctctactaaaaatacaaaaaattagccgggcgtggtggcgggcgcctgtagtcccagctacttgggaggctgaggcaggagaacggcgtgaacccgggaggtggagcttgcactgagccgagatcgcgccactgcactccagcctgggcgacagcgccagactctgtctccaaaaaaaaaaagaaaaaagaaatactgaattttcaaatacttgctttttttttcggtcaaaattatgttctcaaatttcactcctgtagatgtgcgtggctggctgtagtttttgcatttttattattaggtattctcctgttgcattaatatgccacattttatttctctcatgtttttggtgaccacttggggtgttttttggttttgtatttttgctgtatacatgctgccatggtggacatacctctttatacatatttcctgttgtatgcagacacaattttaggatgtgacatcttcagcttttctattgtgtcgtgtgtcttttccttcgtgctttgtgttatttacatattctggacacagattctttgtcaactgtatgtgctgcacatctctttcccagtttgtgtcttcttcttcttttttttttcttaaaaaaaactttctttatagtgttttttttttctttctttctttgttttgttttgtttttttgagatggagtcttgctctgtcacctaggctgaagtgcactggccgatctcggctcactgcaacctccgtctcctgggttcaagtgattctcctgcctcagcttcccaagtagctgggattacaggtgcctgtcaccacacccagctaatttttgtatttttagtacagatggggtttcaccatgtttgtcaggctggtctcgaactcctgacctcaggtgatccaccctctttggcctcccaaagtgttgggattacaggcgtgagccacagcacctggcctgtgttctttcttaagtagatgttacttttaatataatagaatgtatcatattttgcttttatattagtactttttctatctaattcaaacacatccccaagggtctttgtgtgtagactgaccaatttctcaagaatcatgaatgaatactgcttctctttccccaatttatctgtaatgctacctttattataaagtttctatgcatgtgtagaaatagttcctgatttttcactctgtgccaccagcataccaatagcacgctgtcttaaatattaaatagcagagctttatgagacaacttgatgtgcagtaggcaattgcccccttgttactcttcttcagggttctttgttgtaccacatgaattttagaattggcttgtccagctaaaagacaactgcaaggattttatttggaagttcataattctatacataatttggggaaagtattttcataataccaagtcttcctattaatgaacacagactctctctctctctcccccacccccacctgtttagttatttatatctttatggtctgttagttattgtttattgtctttcaaccaggtttcatgtttttctacatagaggccttgcatgtgaaagtctttcttcctagcttgctattacaaattttttttaattgcactttttgggtacagtggcttgtactgtaatccccgatacctgggaggctgaggcagatggattgcttgagtccagaagttcaagaccagcctgggcaacataatgaggtccctgtctcaaaaagtttgttttaaaaattgcatttgctgttattcaacaaatgtcattgtgtctcatatatggatttttatatctgataaccttgttcaacaatcttttgattctaacaatatatcagattcttttgagttttccatatagacaataatgtcatctgtaaattataattgtttcttctttgttatttcttggaccttttattttatatttttgtcttgctgcaaggcaatatccctctatatattgtggggtcttttttctcataaagtggggatggtgaacacccttgtcttgctctctgattgtataaagcatgctttctgtagcattttgtagacgctcttttttagattgaggtaattcacttttatttctggtttactgagtttttagcataaattcaggctgaatttgagctaaagctttttctggagacatcatttgaaaaattcatatgatttactttctttaagtcaccaaagttatgatttacattgaactgagtttctactgtttaactgtattcttgggagaaaacccacttgtcactgaacaatatctgttttatttactgctgtcttgtgtctaaattttcttttaggattttttgtatatgctcagattagcctgttattctcctttctgtatttttttctggtttgggggtcaaagttataatagcctcacaataagagctaagaaaccagccctaatggaggccggggcaggaggtttggagttcaagaccagtctgggcaaaatagtgagacccccatctctatgaaaaatagaaattagccaggcatggcagtgagtacctgtagtcctaggtacttgggagggtgaggcaggaggattgcttgagcctaggaatttgaggctgcagcgaactatgattgtgccactgtactccagcctggatgacagagcgagaccctgtctcaaaagaaaaaaaaagaagaaataaaaaggaaaagataaaagagctaagcatctgtttccttttttccattttctgggagagtatgtgtaagactgtaattaactgtttcttgaataatgggagaactctgtaaaataatctggctttggtgttacctgtattggaaggatgaaaaataccaattcagtttcattattggttgatagggctactcatgctttttgttttgttttgttttgttttgtttttgagaggaagtctctctgtattgccctgttgtccaggctgagatgcaacgttgttcacaggcctgatcctggctcactacagcttctaacttccgatctcaatagatcctcccgcctcagccttcccagtagctaggactacaagcatgcagcatcacatccagcctcttttcctgcctgacccagttctggtttcctttagttttctaggtgttcatccattttatctaatgtttaatgcatttggcataagggtgctcagtgtcctttcattgtctgttgtctgtaactgttgccattttcattcctatttatgagtactggcgtcttctctcactttttcttaataatcctgctggaactttgctttttaaagaacatcttttgacttgttgattcttttttcatacatattaactattttcttattttttgcctttatatttatttcttttcctgtttgaaacattgctcttttcttactataaaaatgggtaagtagctcatgaattaccacctcttttaaaaatcttttctactgtaagcattttagcagtttacatttgcccacaagtaccacttcagctacaccctatgtgcttttacataaagtcttcatttttggtaagacatattctcaaattttaattatcacttgtttttaaatccatgatgttttatttgaaatgttgtttctaaagatacattttctggttatacttttattcttctaatttagcacagtggccacaaaacatggtctgtgcagtgcatacaatcgatgagtaatttctgagctgtagtatttggcataatatatggcaaaatttcctaagttttccatgtgtgctttaaaaaacttccagtaaaatacataaatctgttagatcaagcttctcacattgttcaaatagtctatatgtttactgattcatttgactgcttgatttatcaattacaggtaggaatgtattcaaatctcctattaaagtgtgacactcaagtggctttttaaagacagagatgccaaaccaatgaatacatgattttccccaaagcctgcacaaattctctaatgaaattttaccatgaaagtttgtttaattaaggcttactaaagcagtatgttgtcttttactttttaaacagagaatatatattttaatacatcgtttaagtttatgattaattatctattactgaggataagaatctttgcctgtgctcattcagcatttgcacttcatttatgatctgccttctcatagcttctgttaatttttatactagagacatttatttgtttgtataaatgttgaaggtttttttttgttgttgttgtttttgagtcagagcctcgctctgtcacccaggctggagtgcagtggcatgatctcggctcactgcagcctccatctcctgggttaaagtgattctcctgcctcagcctccagagtagctgggactacaggcatgtgccaccaagcaaggctaatattttgtatttttagtagagatggggtttcgtcctgttagccagggtggtctcgatctcctgacctcatgatctacctgcctcggcctcccaaagtgctaggattacaggtgtgagccaccgtgcccagctgggttttttatattataaggagatgtaatagatagatagatgtttcaaagatagtcaaatgtttttaaaatttaaaacacttttttacaggttgactttcaccatttaatttcatctatgtgttttgccttagagaaattttaaatgctatgtagatctcatgacttataattatgaagcattttgttttctgttttccacgaaacttagcttaactttgagcatataatagttgtaaaggtaggagagtaacactgaaaaaaggaattgcataaaaatggcacattttctgtagagttgtttatcgcctgaaaataggccccatttcatggaagtaagatgatcaggctcaggtccccagacgaaactcttggcatggtttttggagatagtccagggctcagtactggctctatcatttgctacttctcccaaagtaaccaatatctcatccaccctgagcccatttccatatctctaacatgaggataatagcatctaccttacacaccaagtagagggatcaaatgtaggaactaaatcaaagtaccagcactgaataacctacatcctcccacttcccaaaaggaagagagatgtatcccctgttgacaaacgagaccattttgcaggagagaaaggaaatgccagttcacttgcaatgtaaacatgctctctctttttagggatgtccagggacctgagagagaacccatgcttaccaaagagtttctagttccagacacacaggactcgaagggtgacaagtatggttttcagggtccctgaatccacccagtcctcacagaaactcctaaaagctgtcgattgacagcgttgagttcacagctctggtcctcacatgctgatactgcttgtgatatcgaacccgacaggaccccacatcacaattgatttaccaactacaatataatacctcctgaatctccaaattggctcacccaggaacaaaggcttggggtaaaactggattaggagatataagctctgaattttctgagggtgagacacacaaggattctaagtgacacgccacagagtaacgggtctgtgactggaggacccacagatttgtcttactggagacaccacatgcacacaaactccatccttagctgtggaaacaagggtcttttgctatcttagccgaattctgggagtaatttttggaggggaggagatctttgggattgcctctttcaggccctttacaaaaatacctacttcttaaatggtaaagcttacactaaactgaaaaaattacatccttggctttttatgaagtaggtgttggattgaatcactactggaagaagtatggcatcgcaaattctaagcagtggtcaaaggatggatctgttaaattagaaaaatctctaaatttataaaaagattttagattcctttattctaaacaattgacctatttgtactcatgggacaatcaaatttcaaaggagatatgtaacgatttcatggcttgcattaaaaatccttctgataaaattaaagataaaaaatctgaccccctgccaaaaaaatcttttgaagttcatactgcctgctttcaatattctgtgggattcacaatgaaaggtgccttatattgtggcctagcttcaagtttatgccttcgccaccatggcctgggttcaattcccagtcagggccccagcgcctttggtttaatgtttgcgtggcatttgacttttttacctatttagtattggtgagattacctttggtaaaaaaaagtttaaagagtggaaatcgcaattctttgtgttggctaaaatctgattataagagatctggaaggttttatttttctttttcaaagagctctatggtcagaagtcggcttcatgaaaagctaatatttaattatatgtacatacagtctttctggattttctcttttgcctcctgttttgaaaaatatttggatttgagtgaaactccgttttagaaattaattgcttggtacaatatacccatgtaactaccctgcacatgtaccccctgaatctataataagagttgaaattttgacaaaataaaattagattttgaattaaaacaaataggtgcttggttcctctgctcacttctttttaaaaggaattcctctcccatgtacttcttcttttcccttctttaccttccttttggcatctttggtatcacatgaagggatctagagggaattttaagtgactctgaaattccttgagaaatacacaaaaagatcccactcaccccttttgggggtctcctgttctccttgtggagtccagagtcagggacaggctcctccaggtctgcagctctgctctcttttatttcatcttggctgattgctttggttttgtgagtaccaggcattactttgtactgtgagagacacgtcctttgtgagtgcaacggctgctgggtcactggtgagggctgcagtttggagatggctgagagccgttgcaataaatggttgtgattgcagggggctccttgtttctttgcaagtttagatgagaaaggtgcagtttggacacagtttaaaggctgtgaaaacaccaccaatgaatatgatttcctttggggatggtctgattaaaagtgggctgattgttgctgtgctactagccttgaagacatgtttctacagcattgtgcagtgtggaaaaattgtgtggcttggtcttgtggcatgtcccttcttttagagacctcagattcaatgtgaaattcgggatttttgattttcaaagatctagatgccctgccttccagatgtgcctactcttcacatattttaaaattagatcctataaactgcaaatactttgttggcttctgtgagatcagaggtccagttagaaaaggaagacagtttgttaaaattaaaaactatttatctaatctaactagattggcctccaaatatgactttctgacattcagctggttactctgaaaagatttctaaatctcttgaggctcatctatatgtttccttgcaaagaaaaaaaaaaaaaaaaaaaagcaagcccaagcactagtaagaaaaagatttgcaatgtttcatgaaaggagtagatgagtgaagcatttatttgtagatactgggttggatacctgtgcaaagaagaagaggtcaataataaaaattgccaggggatttcttggaacttaacaagctgaattaaatatagaaatgtcaggaaatcaaggcaggaaatactcacttgtggttaggcagacagggcagggttctgagcttgagatggagcaaacagttgtggtgggtgaagttcacatgctttagagctcagctgtcctagtaaagaagcctaagagtctctaaagctcttatgagaagatggattttttttgcctagattaaaaggttaaagaattgctttaagttggataaaataaagctaaatgtttaagcaagttgtgaaaggtttatgaaaaaattaattaaaatatttttgtgtgtaaacatattgactaaagttgaaggggtataattcagcatttctgtaaattgagcattgaaataaaaacacaatgggtttctcttagagcactaacctgctctttaacaaaaattgtaaagggttatagaaagtctataaaaatgttaccttatggtcaaacattaaaattgggtaaatatgtctatcaggttttattaagaattaggtttaacattaatagtacactaatgtaaaggtgaaatttggcttatttggtacaaaaatcatacaggaagcattgtgaaatataaaatgatttttagctttctttgggctatatttctataaatatgttattgatgagggttccaaagttatgggagactcctataattctgctatatctcagtgtacattatcagtcataattataattgtcatgttaaattattgtgggccacagaggtaacagatttccttgtcaattgtgtctttgactatgactaccctaaaacgttcagtcacccatatacacatgttaccttgttttggccctctttagaaggtaattttataatcagctataaagccctaacaggtgctcttaaatgcaaattttgataactttggagattgtgacatcagaagagaggaaaaatgttcgggacacttggagagctaaaatgttcattgatatcaagcaggacaggaattaactgcatgaagtgaactaataggaggctgaagtgatctttttgactttttgcttaaaacgttgctgatcctttgttttgcttttcagagtcaaggcaaattttcttttgagctattgacagcttttaacgattaatcaaaatatactcctatgaacaccatttggagcattatttgtttctctctacccgatttccccagaatttggaaactatttgtgggtattcttaatttatggcaatatagttatttgcataagtgcaataagaatgtgttttctttggtaacaggacacaatttgaaaaactggttattttaccaaggttttgaccagaatgctgtgctttcctttaaggaatcaaacttgacttgtggagctaataaagcctttggaaaactgaccttatatcctgtgaacacagtccctgtacagggttactgatctgtgggaagaaaagaatgtcacattctgacaggtcaggaatcccaagttatcttgaaacttcaagaggacaggaattcacccaaccatatgtatttgatggtagaaatccatggcaggggctcagctttaaaaagtcttatctcagattccttctataaaacaaagtcccattaaaaccaattttaaaagcctatgtgaaaaataattattcttgctgcacctcgtacaaataaagtggcaaagcataataaagcaaattggtcctgtcgtaatttgtctttagtaaaaacgggaaactggggtcgggtgcagtggctcactcctgtaatcccagcactttgggaggctgaggtgggcagatcatctgaggtcaggagttcaagaccagcctggccaacatggtgaaaccccatctctacaaaaatacaaaaatgagccgggcatgatggcgggtgcctgtaatcccagctactcaaggggctgaggcagggaagcggaggttacagtgagtcaagatcgtgccacttcacgacagcctgggtgacagagcaagactccatctcaacaacaacaacaaaaaagggtaactggagagagggaagttatgtttcaaaaacttttggaaactatagtacacctgtttttaaattctagtctggcattcagtttttattattttctacagtttgggttaaattcgtatttctctggctacaagtctcctaaataatcttttcatttgtttcctttttctttccctttttccccatttttcttaattggaaatcactgaaacctaagctgtgctttcttaaagccctgtgaactgaagactagacaaccgaaacttctgaaggaagtagcagcaacctatttatatgtgttgctgttgcctactattatgttttagcaggtgctgcctctacacccccgaaacagagagtgctactgggaacaaatcgactttttccactccagtgctgcattcggtgccccataacgatgaccccctctcagcaggaagtagccagaaagattacaatgctccatctccctatgattcttgtgataaataaatatacaagcatgatagaaatcatgcgcaaattgacagtggggattgtggcaggccagatttcactaatggaggtccccatcacaactacttcagtactgactgagtggttaagttcagtatcaaaagctgaaagtgccagcgcctttctacaaaggctagaatgtaacaaaagcccaccaagggttttacctaggcctttcctgggccttacagcatgacaaaacaaagaaggaattcttaaccagacctgtttaggattaaacaaatttaattgggggtctgaagaaactcgccaggcctccacaaacaagttcattgggggtctaaaggaaccccccccaaacctctgtgattgagcaggagacaaggtcagggtaattgccccagcacctggactcatttagatttaagtaaatgtactgaggctccagagaaaggtctccaagacttagactagagttacagattaaaagaagttaatcacttatatctttagataaatgcacactgacacgtagacatacatcttagaaaatatataagctctggaaaaccttgtaatttacagttggtctggagatattttctgggccttctctctgtaaccggttccagaaataaaaaactctcttcctccccagtttatctgcatctcgttattgggccgtgagaaatagcagccagaccctgagtttggtctgggaacacactggctgggcttcctgcctggcggtagagcttcactgtcctccttcccagccaaaatgtggcccttgaaggcttcctccccaactgaccggttttgggttctaggtactcagggaacaccgtcttcaaggaggccattttcatactgttcctggtttgatttttctgaaattaggaaatgccccttgaggcatccaggattgtctttatttcccctgaagcttcccctcctgaagaaaaaagttctcaaacaccctcaggactcaaaccccaagttcaccctgtgaaacattcccatttcctaaacccaggcaggctcatggccctcagcctctcagaccccatggaaacctcctcccccacttcacgggttctctccatattgagagcctcccctcctcggcacacaacccagagactcaccccaacatgtgtagcaaatcaccctggaaacaatcatggctgaacgtggtagcccatgcctgtaatcccagcactttgggaggcccaggaggtggatcacctgaggtcgggagttcgagaccagcgaggccaacatggtgaaacctcgactctactaaaaatacaaagttcactgggcattgtggtgtgtacctgtaatctcaactactcaggaggctgaggcaggagaatcacttaaacctgggagacagagattgcagagagccaagatcgcaccattacactccagcctgggcaagaagagtgaaactacatctaaaaaaaaaaaaaaaaaaaggaaaaggaaaagaaaaaaaaaatcatgaggcaacattgcatttaacaatattttatttatcaaaagacacttgtctttctcaggtaagtgaaggtctagagatgaaacgagtcccgatgtaaattgccccatgggcattgctgagatcacaagatcatcactgcagcatgcagcacaatagtaaatttctcaggatggaagttcaacaatccaaaaggtagtattttttttcatgatgctcagtccatcatacgaaataaaaataaattccttttcatgatcatccattcagtagaaaaaatgatagtaaatttgttctcatgaagatttttaccgtaacatataggatttatcgttattattattattctttgttttttgtttttttgaagcggagtctcactctgttacccagtctggagtgcagtcgtgcgatctgggcacactattaacctccacctccagggttcaagcatttctcctgcctcagcttcccgagtagctgggattacaggcatgcgccaccacacccggctaattttcgtatttttactagagatggggtttcaccgcattggtcgagctggatttgagctccggacctcgggtcatccgcccatctcagcctcccaaagtgctgggattacaggcgtgagccaccgcgcccggcctcaatttatcattattcacgcatccacaaactgggttcttatattttgtacgtgattttttccattgaggagagatatctgtgcatattcatgctgctcatatttcatccacaaactcggttcatatttcatccacaaacataattttttccgttgagaagagatacttgtacatatttatgctgttcaaattcacatttcatcattcttttacaagaaatagataatgtattttaaggttttccagtggtattacagatattttactgggtgtatagatagaaattaaaccaaacttctttgttctggccgccagtcatgcatcctgttttcaacatagttcacatacaactggttgtgtaaaaatgaaattattttgtttagtacaatcatcaacagttggttgattagatttttaattatcaagttaatcattgtcattatgcttctcatcgcactcgtcattaattgctgtgggaggaaatttgttatgttccctatgagagggtgtatcacaaattcaaataagaattcaacgacaatggactgtataaaggaaataagcaagtccatggaaaacatatttttttccggaaaggattaaaatatttttaaaaaggaattaaaaaaaaattgggcacggtggcaaatgcctagagtcccagctgctcaggagatggagacagaaggattgcttgagcccaggaataagttggaggctgtagtgaacagtgattccaccactgtactccagccagggcaatagagggaaaccctctttctaaaaagacaaaaagaaacaaaacaaaacaaaaaaacaccacatcaaaaaacccaacaacaaaatgaaaaaccaaataacagcaatacaattggagctattcgatccaaagaagtaaatgaaacataaagcaaataaaagagaaaagctaatacctgtgtcctgcaggactcagtccaagttctgctctgactccctcctggtgagccaccccttaaaaagtcacttggggcggggttactttgacagacagtcttctgtcaaagagggaggcggtaaatagcacttttttttttttaatttaacgcctttccaacaaattagcggctatgttgtctaagagtgcaaatgtcagaggtgggtacaggcagcaagaccctccccacaggggcagcagaaggaggaatgactaagggaacaagactttagtgtgctcaactacacaggacaggaaacagatgctttttacaaaagctggtggacttgaaggcagaatattttcaagttcctgtaactgcgaactatgacctgtagcctgtgagagtgactttctgtggcaaaggagcttttgtgaatgtgaggaagttaattatcttaacagtgggaggttctcccggcttatctagctagaccctcgtgaaatcccaagtgtccttaggaaggggaagcagagagagatttgagtccagaagaggaagaaggtgatgtgaggcccagtaggggaacaaagggcgatggcatgtaaacacttagcccccagaagtgggagagggctggggttcatcacaccagaatccctaacaatcagccttattttaattacccttgaaatggaaggaggccttagagagccagaggcttggaggggcaccctctgctgcatacacagatcccaactgctgtgggctccaaataattgcaccagggaaatcacaaattatcaaaaataaaggatgtaaagcttttaaaaaatattaaaagcccaacaaataaaaaaagttctaaatctataaaattgacctcagtctgtatatttagatgagtcatgtgtatatagcgtttcacttcaaaatatatgataaatctctcattcattggcttaaaaataaacacttcaatcaagtctttatcagaaaaattgaaacgttaactcaattgccttttagttcatgtgactttacaaaacttaaaacaataaagtcagttttaaaaattattagtaaagtaaaagaaaaatatcttcacaatgtagacattttgtccacatgagacatgtgaaatattgccattactaaatatttgcaggtcaaaaactgtttccaaaacattttaaataatcatctggcctgtctgttttagagcattcaattctagctgaggtctggggacatgtgaaaggagccacggcccgactccgtgctgggaagagtcagacattttccacagctctgtcctttgctgtgggctctgcaactcctaccaattaaaattgcttacgtttttgttttatttttactaaagaggggttcctaaaagctaacattatactgagtatatgtaactaaaactactaagaaaacaatttcacaattatacaaatgtgccaagtaaatgaaaaaataaactgtattttaataaaggttataaaaagaaaaacatatagtggtgtgaggactgtctcaggtcttcactgagcaagggatcatgacattctatggcggacagctgaccttggctttctgctcctcttgattatgtctactaagtgacatacttactctttttccacctgtcttgcctctaagggtaacaggttttatgagatccctcctagtgctttgcaggtcagcctccctttgctgcattccaattttactgcctataccctccagctggcttttgatgacaaaagtcctggtcccagccattctcagattctgtcatccccgtgggcactatggagctcagcactatgggaggttccccaaaaatctcgttttctatgaggaatggccaccacctgcatctcagtgatgctagtgacccctttcctactcctgtgctcactggtcctcatgaagatcctggttggtctgtagccccctatttttcctattaaagagaaattacagtaagacccatttgtgtgcaaaatcaattttaggcttattacacttggcctgataatttgcataaaatgcagcaagaattcatcggccatataggctacttttgagttaattttcctgggtttttacctaaaaatatactattttggttagagtcttgtgaaaataaccaatgtgttcaattgttttattttaaaaggctcttactgaacactataaatatgtataagttgaatatacaaactatattgtcataaaatcacaacccaaaatgtggagaacgcagagggaaaggtaaatttgctcgcaaaaacatacttcacccaaataactggaaaaaaaaaaagactttcatgacccttctttaaccagagcagcagctttcaaacaaggtgtttgccttggaaatgccattcacaagccaaacggcccttgagagctgtctgtcaggcactgtagaatctagcagctcctcacagagttagaaatagtttcaggaaagagattccctgcttttagtaactgcactttatattcccagatagcgagattgtatgtaaaccatttttatcttattctggaactcttttgggtactttttttttttttttttaaatgatggagtctggctctgttgctcaggctggggtgtagtggtgcgatttcagggtatgagaaaatgcagctggacctggctctttccaggaagaccctcacagccaaggagtccaaagcctggggttttcatctaattccagtgtgactggggtaggagcagctttggtgctgggtgtgtgtgtgtgtgtgtgtgtgtgtgtgtgtgtctatgcctgtgtctgtttagggtgttaggctcgtggttgtctagatacaaatgtcccagggctcaggagccccagggttatgtcaggggcaccagatgaaggtgtcaacagaagttagggcacaagggacaaaggtgagagcaaggttagattcatttaggtgcaagaaatcatagagggaggagggagaggaagccctcctgctaccaccgaggaagaagcgcagcttaaggcagaaagcctgtccggagaggaagtgagtttgagggcagggctctctgggtaaagtacggtctgggacaccagcctgggggaagggtacagaatgcagagtggcctggcgtggggactaagaacagaggagagcagctttcactgggagggtcagtgttttcagtgtccagcactgagcaaggtgagatttgggcagcttgctgtgaaataaggtcaggctctggcattgtccccattgcgtgtgtgtgtgaggggcactttgggagagtgaactctccacctccatcctctcatacgtccttcaaccgagcttgccagttaccctgattccaaggagatctatttattgttgacaatactggatcctagcagaggctgggtaggagcctgggcacaagcaagtggaggagggggcctgggcctgaaagacctgggaggtttgagagaggacacagcccacagaatggagcagatggggtagagtcggcaagcattcagggctcctagtaagttggacaatggagaccctgaaagatccagtaaaacggggagaacaaacaggtccccaactcacatccttgcagtgcctggagcttcagactccagacaggtggggaaggaaaattgagggatgtgaacatgttggagaatgtcgtgccctgaagaatgaagaaaaggggggtgaggaatgagagcaggaacggcttccagtgcctggtgcccaggagaactcagaaaatgggtgtggtggagaggaatcgaggaaccggaagtggtggaagtgtgcagggcccctccgagatcactgtgactgccaggcgtcctccctggctggagagcttcactgtcctccttcccagccaaaatgtgtcccttgaaagcttcctccccaatggactggttctgggtcctatatatttgaaggggtggcctgcctctccacacctgtgggtatttctagttgggtgggaggagagacagagaaaagaaataagacacagagacaaagtataaagaaacaacagtgggtccaggggaccagcactcagcacaccaagggcctgcaccggcaccggcctctgagtttcctcagtttttattgattattattttcattatttcagcaaaaaggaatgtagtaggagagcagggtgataataaggagaaggtcaatgaaaaacatgtgagcaaaagaatctatatcataattaagttcaagggaaagtactatgcctggacgtgcactcaggccagatttatgtttctctccacccaaacatctcagtggagtaaagaataacaaggcagtattactgcaaacatgtctcacctcccgccacagggcagcttttctcctatctcagagttgaacaaatgtacaattgggttttacaccgagacattcagttctgaggggcaagcaggagacagtggccttcctccatctcgactgcaagaggctttcctcttttactaatccacctcagcacagaccctttatgggtgttgggctgggggacagtcaggtccttctcatcccatgaggccatatttcagactatcacatggggagaaaccttggacaataccccgctttcaagggcagaggtccctgcggctttccacagtgtattgtgcccctggtttattgagactagagaatggcaatgacctttaccaagtatactgcttgtaaatattttgttaacaaggcacatcctgcacagccctaggtcccttaaaccttgatttcatacaacacatgtttttgtgagctccaagttgggtcaaagtggctgggtcaaagtggctggggcaaagctacaaattaacaacatctcagcaaagccattgttcaaagtacaggtctttttcaaaatggagtctcttatgtctttcctttctacatggacacagtgacagtctgatctctctttcctttccctacatatattcatggaccacagtcttcaaggagtccatttcctcactgtttttggtttgatttctctgaaattaggaaatgccccattgaggcacccaggattgtctttacttcccccagagcttccactcctgaggcaggagcttctcaaacaccccccaagactcaacacctaatttcaccctctgaaaccttcccatttcttaaatccaggcagggtcatggtccttagcccctcagatgctgtggagaccttctttccctttcatacattctctcaagattaaaagccacccctcctcagcacacaccccagagactcaccccaacatgcattgcaaatcaccctggaaacagtcataagaccacactcatttaataatattttatttatcaaaagacactctttctcaggtaagtgaagttctggagaggaaaagaggagtcctgatgtaaattgccctgcaggccttgctgagatcacaaggagattgttactgcagcttgtagcacaatagtaaatttcttctctggatggaagttcaacaatccagatcgtagtatattccttttcattatgctcagtccagcaaatgtgatgataacaaattccttttcatgatcatccattcagcagagaaaatgtttgtaaatgtgttttcatgaagatgtttaccataacatacaggatttaccattatcaatgcatccacaaactctgctgttgttttttatacataattttttccatcgagaagtgatagttgtacatattcatgctgttcatatttcaaccacaaactctgctggtttttttatacgtaattttttccattgagaagtgatacttgtacatatttgtgctgttcatatttcatgtttcatcatccttttacaataaataggttatattgtattttaagtttttctaactgtagtgcagaaattgtactgggtgtatacatagatatcaaaccaaatttacttgttctggctgataatgcatcatttatttcatagattatgtatttctttgacacatttcacgtacaactaattgcataaaaatgaattttcttttagtatagacatcagcatgtgcttaattcggaatttaattgttgagttaaacatcgtcattgccttttccgttgttattaattgctctggtgggaattttgttatctcatacataagacagtgtgccacaatatctcttaaaatttcaatggcaataaactttatatttaaaaacagggaatctatggaaaacacatttttttctaaaggattaaaatatttttttaaaataattttctaaaaagttaggcacggtagcaaacgtctagagtcccagctactcaggaggctgagacaggaggattgcttaagcctacgagttgggggctgcagtgaactgtgattgcaccactacattccagccagggcaatagaagttaaccctttttctaaaaaaaaaaaaaaaagaaagaaagaaagaaaaaaagcaacaacaccaaaacctcaccaacaaaatggtaaagaaaaaaaaaacagcaatacaatgtaagctatttgatccaaagaagtcaatgaaatttaaaacaaatgaaagggaaaaagtaatacttgagtcctgcaggactcagtccaagttctgctgtgcctccctcacggtgagccacccctttagaagtcacttgggtcataagttaacccgataggaagtgtcctggccaatgaactagggaggtggtaaatggcaccattttaaatttaaattcacggccttttcaacggatcagtagccatgttgggtaagagtgcaaatgtcagaggtgaaaagaggcagcaggaccctcccctagtgcttgggcaacagaaggtggaatcactaaggggacaagactttagcatgctcaagtacacaggacagaaaacatgctttttacaaaagctggtaaatatgaagagggaacattttcaagttcctgtaaccaagaactaccgcctgtaaccggtgaaagtgactttctatggcaaaagcgtttttgaaaaggtgaggaagttaaatatcttaatgttgggaggttcttctggtttatctggctagaccctaatggaatcccaagtgtccttatggagcggggagcagagagagagatttgagtccagacgaggaagaaggtgatgtgagtctgggtgcgggacagggggagaatgatgctatgtggggatctgggctggggaatgacttagctgcatgagcggagtgacttagactcctgaactagaagaaatctagggctcatcacctcagcagccctaaccatcaaccttatttttattacaggtcttccatcgacggactccctaaaaagccagcggcgtggaggggcgccctctattggacaaatagatcttgactactttcggccctcaaatagcctgactaggcaaataacaaataataataatttttttttaaatcatggaaaatattttaaaaaacaattaaaaagttataaatctataaaatctgcttctgtctgtgtgtctgtatatttagatgtctcatgtgtacataatgtttcactaccaaaatatatgatgaaaccctcattaatcggcttagaaaactaaacacctaaatattttctcagaaaatacaaaaactttaactcaaatcccttttaattcacctgactttaaaaatctttaaaaaataaagcatgctttaaaattattagtaaagtaaaattagaacatcttcagaatttagacatttggtttaaattatacaggtcaaatactgcccttagtaaatattttcaggtcataaacaactcctgtaatcttttaaataattgaattacatgtctgttttagagctttaagttctagctaaagcctggggacaaatgaagggcaccatgccccctctctgtgctggaaagagacattttctacagctctgacccttgcagtaggctttgcaactgctacctatcaaaattgcctacatcctaagtttattattaaaaggagttgcttggagttaacattataatgaatatatgtaactaaaactatttctcatacaaagtatatgaaaaagtagaatgtatttttaataaaaagttataaaaagacatgaacatgtagtttttataaaaaacagtaattttgtctagttttgcagttctaaaaagttatgttaaattcaaaaataaaaaataacaagacaagactcaaggtttaaataagttgtaaaagatttgtaaaaattagttctataaaaattttacaaaaaaaagcattggttaaaatttaaggaattattttgtttttacagaaattaaacattcattaaaaacactctgatacaaggccttaatttgggttcatgtatcagaatagcagggttttcttagaatattaatctattctttaaaagaactatgaatgttatgcaaactttataaaaatcttaccttagagtcaaactgattaaaattccatagattttacgtaaaattttattaaaaattaacttcaacaaaaataaaatttgattttctcctttaaacaaaagttttgcgtaatattaaataataaagcatttttgtttaccttttaaactataaacacacacacacatacacatacaccaacactaaagtcagctgacctcatactgtctttattggatattcttgtttaaaaaactatcttctttggaaaataaagttttttattttaaaccatattttaaattatcattttgactaaatccataacatacagtgatctgtaataattctattttataatatcaagtgttttgaagaactccaggaacagccatgagagaacactgtggtttagtaacactttatttcctcagtttgaaaatagttgtctttcttggggaggccggtttcagcagatgaaaacaagagtcatgatgaaaattacccagcagtggttagtgtgaccataggaacattgtcatcaggtcagcagaaaacatatcagcaaatttttctcatactggcagtgtgtaggggtggatgtttacagttcctgaagccccagtggtcgtgtggtcttttagttttgccatttataggcaacttgtggtaactagctcaattagacacattccttatcacaaggacagagggctttctgtatcctagggttcttgccttggcattccagaagaatcaggtcacacgtggacgtggagaatgagtgcaaggttttattgagtggaagtagctctcagcagatgggggagccagaaaggagattggtttctccctggattggggccgttcagcagccctggctctcctctgactgccccaggcaaaatccacatcgttctataagtcggtgccctgctggtgtgctggtgcctgttgtcatgttcctcttcatgtccagccgcctgtgtgttcctccgctgatgtgctcctctcgacgtcaagcctcctgtgtgtctgactgctagggtcttggggtttttataagcacaggatgggtcttagcaggccaggatgatcttgggaaagacaacattcggtcaggaaaacaaaaatgcctgttgtcatctaggtccgtggggacaagcccaggtgtggagcttttagccagggaccacagcctcctgtatccaacacttcccttcaccttttctatatcattcaaagggatcatgcccttcccatcccagcacttcactttcatgtcatttgccccctctgaagaggtacatctaactgccattagaatatggatgatgaccagtcttagctgcttcctgctgaaagggggcattgttttgggggaaaacggcagtcagattcctcccaggggtctctataataaaagatcgaggtggctactttcaggaggtcctctaatgtactatctggtcccaagtcccatttctgcaacctcctcctgatgtcaggagctgcctgagtaataattttatcctttaggattatctgtccctcgattgaattaggagatagagaggtgtgatttaccaaggcctctcttagcctctccaggaaggcagtgggattttcatcaaatccctggttaattatggacaacttagtataattgagaggcttggtcttagacctacgtaagccctctattatgcacacctgaaagtgtctcctcttccagtcttccatctcattattgggatcccatttagggtccttcactggtgctacttctcttccagttggataatattcgctcccttccctgatgctataggtgatgcaaagctcatccccaaatctctctgctgctggcagagcagcctgcttctcagtgtctatcaggttctgactcaaaagtaacataacgtctctccaggagagttcaaatgttagggtgaaattctggaaagcttctatatatctatcagggtcatctgaacacttgcccagatctcccttaatttgctttaagtcttgtagggaaaagaggacttggaccttactgggcccaaattcactgggcatctgtaggaggggcaagagtgagactgggcttgtttgggatgaagatttctaggaggggccaggtgagaggctgaagctggatacggaggttggggtggacccagaggagcagggcttgagggagctggcacgtcagctgggggtgcgtctgggactcgtgtctttaattccctgggcttgaccctggcagccttccccgagacagcaaacaggagggctggaacaatcctacatgtcagcaaaggtctggattgctttgcaaggtatagaaagcctgcacatttggggcctcagaccatgtgtcctcacatccagagaaaagttctaattgcaggatggtattgaaatgaatggtcccttcctgaagccaagccagtccttcctgtaaaccataatttggccaaacctatgtgcggagggctatgagatgcttttcctctggattctgagggtcaaaacagtcccaatggttcaggatacactcaaggggagtacaagctgggggtggtgaggagaactggctgcccattctgaaagacagggaatagaggtgttcctcatttcccttccttcttttggcaaaaagctcagggtgtgatggggagggaaagcaagcatcttcacttcactttccacctcttacccctgcgccctggcaaccttggcaggtgccggccacaggtacaaatgcggtatgtacccatgaagcagggagaacctggagattaggaattaactgccctcacctatgtttccttttctccctgctgttgaaaaactttgagttccctgggcctttttatcccatgaggcatggcctccttctgtgggatggggttcagtcagcaggaattggtcctgtccatttacattgtgcctgttgcctggctttgaattcctcagacctgctttctctttctagggcctcagcctgaagcttggaattgagtttgggactgaaaaagcatttcagaggctgtttatatccatttagtgcctcaaataagccctgctgaatttgcaattatcagccagcaggggtcactcctctgttaacttccctattagaaacagagcggtggggattctcacttagaaaagaaaaaaagagaaaaacagttaaagaggcaaaaagtggggaatgctgggggaagaaccccttgcttagtgcaagtgggcccctctaatccttataactttcccatccttcccccagttcagaccaggttgaattccttggccatggaaggaaaggttccattgatgcagtgggtgagaagcactctgtagggtcctggctaccatcggttttctcacacccccctcatcccaggcagtggagggagacacttctgcgacattgctccccctgccccttcatggctattgggtgtggcctttgcctgctgcaggcatgcctaggtgctggagctgggagggaaaagggtaaggagaggtgccctggaagccgctcatgcctggggctgtcaaggtggaggcatacatggcacctctaggaaaaattggtctgatttgcacctttggcggctgagccaaatgctcattttacttagtaacattgcctcagcctgtagcaaaactcttaacattataaaggaagagataagatccatttcaaataatgtgtgagagagaaaagagatgaaaggaaaacagagtcttttacctgcaggaaagggagagaagtggcagagttttggaagaaaggcaggcccaacagtttcccattcactcacactcaccttccgagatcccagacgagccaccagttgaaatgggaaaagtttccttgtccccctcacaggaggtggagtgggggtgtggcttgcttctttagtactccgctgctcaaacctctagggaagcatacagactggcaagttgtggggctacaaccccatggcagcatctaggggtagatgtttacagctgctgaagccccagtggacatgtggtaccatgtgctcttttagttttgccatctataggtggctttgtggtaaccagctcaattagacccattccttaacccaaagacagagggctttctgtatcccgcggttgttacctaggtgtaccagaaaaatcaaatcacacgtggtcttggagaatgagtgcaaggttttattgagtggaagtagctctcagcagatgggggagccaaaagggagaatagttttcccctgaagtcgggttattcagcggcccaggctctcctctggctgccccagccaaactctatgtcaatccattggtcggtggcctgccagagtgctggtgcctgttggtggattcctctcagcgtcgagagtttttccctctcaggaaagggagagaagtggcagccacccatgtgttcttgcactgatgtgctcctctcgacgtccaacctcctgtgtgtctgcctgctagggtcccagagtttttttaggcacaggatagggcatggtgggccagggtgatcttgggaaatgcaacatttggtcaggaaaacaaaaatgcctgtcctcatctaggtccaggggcacaagcccaggtttggagccctagccagggaccccggcctcctctacccatcactttccttcaccttttctgtatcattcaaagggaccatgcccttcccttcccagcacttctcttctgtatcaataggtgatgtttttaaaatttcccaactctagtgcaggcatggtactagacatatacatagaaataaaaccacacttattcttctggctggcaagacatagtatttttgccaaattatgtgttgttttgaagcattttatgtacccctggtcatataaaaataaagctattttgttcagtacaaacagcagcattttctggattagaaagttaatcatcttaaaagatcatcacggatttttccattgcactcatcactaattgctttggcaaaaaatttcttatctcacgcatgacaaaatcagccgcagtatctcctagtaatttaatggtgatgatctttataaaggaaataagcacatcaagggaaaacataattttttttaaaaaaagagtaataaaactttttaaaagtcttttttaaaagactgcttttctaaaatagtaaaataaaactccaccaataaaaccaccaacaaaacagaaaagaaaaaataatgatatgatcggagctatttgatgaaagatggtaaattaaatttaaaatgattagaagagaaaaagcaatacctgtctcccgtaggtctcagtccaggttctgctatgcctttctcctggtgagccacctatttaagagtcgcttaaagcatatgttaatccaacaacagcagattaaaaaccaatgcaatctgaactatttgatctaaaaacataaataaaatttaaaacaaataaaagagaaaaagcagtacctgtgtcctgtaggtctcagtccaagatctgctctgactcccttgtggtgagttagccctttagaagtcacttggggtggggcatatgttaattccactaacattggttctggccaatgagtcaggaaggtggtaaatggcaccttttcttcttgctgatttctttcagttcctttggagtctggacattagtcctttgtcagatgcctagtttgtgactactgtttcctatactgtgggttgtgtgtttaccctgctgatatttcttctgccttgcagaagattttcggtttcattaggtcctattgatcttattctatttttatatttttgcgtttgcttttggggcattagtcatgactacttggcctaagccaatgtctagaaaagctttttggatgctatcttgtagcatttttagactttcaggtcttagatggaagtttttatatgctttgttaaagatcaggtgactgaaagtaccgggctttgtttctcggttctctattctgttccattgctctatgtgcctatttttatacttcctgcaccatttattgaataaagtgtcctttccccaattagtgtttttgcatactttgttgaagattagttgtctgtaagcatttggctttatttctgggttctctattctgttccattgctctatgtgcctatttttatacttcctgcaccatttattgaataaagtatcctttccccaattaatgtttttgtgtactttgttgaagattagttgtctgtaagcatttggctttatttctgggttctctattctgttctattgctctatgtgcatattttataccagtatcatgctattttggtgattgtagccttgtagtataatttaaagcctgccttcagatttgttctttttgcaaagtattgctttggatatgcggtcacgtttttggttttgtataaattttaggattcttttttctagttctgggaaggagaatgatgatattttgatgagaattctactgctctgtagatggctttggagagtatggtcactttcacaatattgattctacctattcataagcttataatgtgttcccatttgtttgtgtcaactgtgatttctttcagcactattttgtagttttccttgtaggaaacttacattaacctacttggttaagtatatttctaagtattttacttattaaaaattctcagggaaatgcaaagtaaaactgaggtgggaaattaaagaaaaataaaattaaaaagaaagggaaataagctttcttgtattaagctaacttgtcccagaggcagcaacaggcacagcccagacccaggaaaagtcttgataatattatttattgtattctggagactcttccagcactccttcaatgtagggagaagaaaaacaaattttcctttgttttatggtatgagtttatagattcttgttctctttaactagtaacttcaagtattctgttttatctaagaagtatggcaaaggtcatgagaagcctgagcaggcctgaactacagctctctaggcaccatagtgaagataaaccaatgcaagcctctttagagcaaaacctagataatagacatctgggttgcatagcaacagttatgtgcaatcctgagttatgaacctgttacaatttgattaactgtctttttcctgcctctgtatccctgctttcacaccactgtaagcttgcttcaagctggcccacccccttttgtgaagtgtgtataaaagtcaagtgctgtctttgttccaggccctgtctttggacgtgagtctgctgggcctgagagcactcaataaaagattctcctgttttaacccaaagcctctctctcatcctcctaaatcccacaacaaaaccacaatgagatgctatcttaatcttgctagaagcccataatttaaaagtcagaaaacaatagatgttggcatagatgtggtcaaaagggagcactttgacactgctagtgggaatttaaactagtccgaccactatggtaaacagtatggggattccttaaagaactaaaagtagaccattcattccagcaatcccattactggctatctacccaaaggaaaagaagttattccataaaaaagacacaagaatatggatgtttatagcagccgattcgcaattgcagtgatatgggaccaacttaagtgcccatcaacgaacgagtggataaagcaaatgtggtacaccatggaataatacttgataataaaaaggaacaaaataatgtcctttgcaacaagttggatggaactggaagccattattctaagtgaagtaactgaggaatggcaaatcaaatattgaatgttttcacttttaaatgagagttaagctatgagaatgcaaaggcataagaatgatataatggacttggggactcagggggaaaggttgggagggggatgaggaataaatgatgacatattgggtatattatacactgctcaggagacagatgcctcaaaatctcagaaattaccactaaggaacttttatccacataaccaaaaaccacatatattccacacactattgaaagaaacataaacattattttaaaaaataaagccacttttaaaattagcaaaataaaataaatatgtcttcagagtttagatattggatccaaattagacagatcaaatactgcctttactaaatattttcatgtcattaacaacttctaaaacctttcaaacagttttttgacatgtcttggaaccatccatttctagctaaggcctgggcacctgtgaaatagggccatgcccccccttatactgggaagagtaagatatttcaagactaagatgttttctacagctccatctttttctttaagctctacatcaaggacataattaaaattggttgtctcctaagtggtttactaaaaatgcatacttaagagttaccattataattaatatttgtatctaaagctacttaaaaattttcacacacaaatctgactgaacaagtaaaatatattttaagtcaaagtttataaaaggacatgagaacatagcttttatgaaaaaattagttttgtcaagtttagaggttttcaaatattttaaattcaggaaataaaataacaaaaagacaaaagaaaatggttgaacaacttagaaaaggtttgttaaaattcatcttataaaacaatctacatgtaaaaagtgggctaaaatttgaaagagattatttaggttttccataaattaatccagaaggggtaggaagtcttaagaatgaggaaggacaggaggaaggggaggtcatcctgacactgcagaggcagaagtgcagctgaaggtatgaaggctaagaggggaggggagtttgagtgctgctgcctggctgtcagagcagaggagggtcctgggcaccagacttgaggaagggatgaaaatgctgggcagacctgtagtgggcccttgagatggcagatagtggtttccagagagagggccattgttttccagtgcccagcactgagcagagagagttttgggcagtgtaaaaaaaaaaagagaacttacctctttctcgttttagaaaaagaacagtctaagaatatcagcagggaaactctcagtgcttcaaggggttaaacgcccttttggctttcttgtgttggtttcatcatagaggaggagaaacttcttggaagtgttcctaaaaacacaacacgtctgcttctcctttcaaaaaaggaagtgctaaaacacgaacactctagatccaaatattaatacggatgtctaaatgcttccgttttccaaggggcagaaagctaaaggttgtaacctattcatttcagtcaaagttggtgaaagggaagcaaaggaactgggtggggcttggaaggatgacgaagctcaagctcattggccagcaacctctctcctgggggcgggaggggtgagcatacgtcattgctttggcttctataaaatgaggaggactcaccgagtgtgaagagtccttctggtgattgcagctgagagcacactcacgacgttctgcaaggattctctgattatgattctgaagggaaaagcgatggaatggacagcagagattgtaattttctttatcttgaattacggaagaaagtatctaggacagaaatccacgacaagtccttggaaccagcagatctcttcgttcacggagacgttgacgtattctctattgaagaagattcttaccttcttactggacaaggttttgtcagttctgcgtgactggattgtccgggagactctgaggaaactgatgtcacatgtttttccaaagaagatgtttctggaaccaacaactgtgattgtggtttgaggacttctgagagttccagtacaggaaataagcagaacatcagctggaggctaaacggatccagacttcactcttcacttcccttcctattcagtctattgtgcctgctgactgagaagcttggctggtatgtgagcaaataaacggaactattcagaaggagatgttgacatattctgtattgaagaagatccttatcttctcacctgacaaggttttgtcagttctgtgtgactggattgtccggaagactctgaggaaactgatgtcacatgtttttccaaagaagatgtttctggaaccaacaactgtgattgtggtttgaggacgcctgggagttccggtatgcgaaataagcagaacatcagctggcggctgaagggatgcagcctccactcttcacttcccttgccattccatctattgtgtctgcctgactgagaagcttggctggtatgtgaggaaataaacggaattataaacaaggagattgtttctcatctacttcattctgttgtggcttttctattttggggttcagggtgtgtgacaaggaccaaggagatgaaaggtttcatgatggagaaagcccaggcaatcagattgaagagctatccacagggaatcttggctgctgaggggctgcaccctgcaacggactgaccatatgacagaaaagggttttaaaggctcaacttctggactgagaacccagagtaatttgggaacctcctctgtgaggagatatgaaagctgggaatcatgacatccctaggaatggaaggcacatttcctgatggaaggggtgctttggaaaacaggagcagagtagacacagcagccttgtggatacgggtgggcagcatgcatgggtgatgtgaacgtggagtgtttgtgatcgaaactcaaaatgtctgacaaagtgaaaacctagaaaccacaatgaggaggaagagtttgtgagggcaatcactctccccatgtgtgaaaatcgggggctcttaaaatctcatctggagaggtgcagtctaccaaactctgggactttagcctccccttttaaaaaaccgtgcatcaataccaacgtccgaaaccacagaaataacacctggcttgcatggagacaaggacaaaaagccgtcatgatgagttgttctgctcacttgctgcctctgttcagtgcacaggatattgtccacccactagcaggctactgcaagagaagtgtgcaatatgttccctatgtgccatatatgtgccatatggcccatatgacaactgagtcagaaaatatctgatgccctcagagttacactccacctggagcttgcccccagccatccaggacctaggctccctaccctgtccaattttctggtgttttgggggcttcattctctaaggtgtgcccactctttactcaaaccaaaacacccacatattcctgcccatgaacaaccaatcaaccacttctcagttccacatcctgctgttgggtctctagtggtgacactgtaactcccaggtcatagtggtgacactataacacctagctaaattgatgccttgtctctaggaggccatgggctcctgcaggtctcatctgactctctgtagccttccctgacaatgctcacaatacccaagccagagccacattgacagcaagctgctctcatcttacctttgccagacctggccactggaaaaggctgaccctcatcctgcaatgcctatacctccaacctttgtctcaagctggtgtcctggagggacttctaagcagaaaacagattcagactcccatcctctcctgaatggcctcatatccaattctcagaccctcagccttcattgtaaggacacttcatccatgcccttgagtattctgtctgcactgtgtattctgcaatagattctcctccctctgcgaccctcaactccttccgcagactttttgttttcttgatcatctaccatagtcttccactgggacactgccaagcccattctggagagtgagttgtgcaagtacactgccccccatctacctttcgggaggtgtatacacccttctttctcccaggtctggaggctttctattttcatcctgaggcatctccacctgctcttggattcttcaaattgacaaccaccagttaacaagaactatgtgtcaccaaatagccaaacaatggcaattacaaaaataaaattaatagctgtaacccccattagcaaggatacacaaatcaaatcagggatagtgggtgaggaagtctgcctaacattcaaggaaggattctgaagtgatacaaaatcattgcctttgctatctttagaatggacactttcagccaggcacagttgctcagcctgtaatcccagcactctgagagccccagttgggtggatcacttgaggccagcagcttgagaccaccctgggcaatgtgcagaaaccccaactctactaaaaatacaaaaatagccagttattgtggcacatgcctgtaatcccaactccttgggaggctgaggcacaagaatcacttgaatctgggagccagagtttgtaatgagcgaagatcatgccactgcactctagcctaggcattagagtgataatctgtctgtggaaaataaaaacattcctcttcaaagttttcttctttaaatcataaatgttggaattaatatatcctctttgaaactcactttcttcaagcttctttatttgatggtagtaaatctttgttaagctttatgaggcaagagtaatggaagaagcatattatatatatttatactctaacctcagtgcttgttctagcaagctcaggcatgcgtgaatgtgcccaggcatgttccagcccataccttatatcctttccttattgggaaatgctgttactcctataagcattcttgtaagcaacttcctctttttctttgtctccactatctttacctattgaggacagttttaggttcttagccagttggatgtagcatagactgtgaggtccaaccccagccaatggagatagcacacagcagtagcgacctcatgcttaacagataaatattcctgtctccctttgtttggggtgctctcagctgatgagcaacaccctttctaaagaaattaaagttgtcttgctgagaaaacttttggtctaaatgctgattcttccttgcagcactgaagaagaagcaattatttccaacactttctcatacacaaaaaaagaagaaggtggaagaaaactttcttgtgcaccctatccctcactcagaaagacaacagaaggctcctagtggcaagccctagaggattcatttcttttgggaaccctcttggctgggatactaggactcaggtcaaactcagcattttcagtgtgtgggaagtgtgcttgggtttcactgttacttccaataatgtgatttggtccttggggttcaccaaattttggtatggagtggtgaaccctgttaagtttaagtgtctataaaattaacaaagcaaaataaccattctgccccatggttcagagaccaaatattgtgtaggaaatgctttagcgagagaaacagagaagaataaaaaatgtcctcaagcgctgcattatttcttgttatcgtccagatcttagaggaaaggctttcattttccctcattcagtatgatattagctgtgcatctgtcatttatggcttttattatgttggggtatgttccctgtgtatgtagttttttcagggtttttgttatgaagtgatgttgaactttatcaaacgtttttcagtttcagttgaaacgatcatatgctttttgtccttcattctcttgatatgatgcatcatgttgatgatttccatatggtgcactgtccttgcatcctgggcatgaattccacttgatcatgacaaatgaatttttaatgcattcttgaattccgtttgctggtattttgttgaggatttttgcatcaatattcatcagagatattggcctgcagtttctttttttttcttttttctttgttttgttgtttgtttgtttgtttgttttgatgtgtctatgtctggttttggtatctgggtagtagtgttccatccccttttattttttagaataatttgaataagactggtgttggttctttaaatatttggtagaattccgaagtgaagtcattgggccccgggcttttctttagtggaaggctgtttattatggcttcaatctcgttacttattattggtctattcatgttttgaatttgttccttatttaatcttggtaggctgtgtgtatctaggaatttgtccatttcttttagattttcaaatttattggcacataattgcccattgtagcctctaatcgtcatttgagttcctgcagtaccaattataatgtctccttcttcatttttgattgtatttatttggatcctgcccctttttttcttacttaggctgcctaataatttcttaattttgttgaactttttcttttgtttgtctcgctctgccaccaggctggagtgtagtggtgtgatcttggctcactggaacctccgtctcccaggttcaagcaattctcctgcctcaccctcccaaatagctgggactacaggcaagtgccaccactcccagctaatttttgtatttttagtagacacgggttttcaccatgttggccaggatggtctcgatctcttgacttcataatccacctgcctcagcctcccaaagtgctgggattacaggcatgagccactgcgcccagcctaattttgtttaaattttcaagaaatcaacttcttctttcattgatttctgtattttttatttccattttatttatttaaactctaagctttattctatcttcttctcattttagctttggtatgcttattgcctctctagctctttaatgtgcattgttagattgtttatttgaagttcttcctctctacaccataagacgtaagcatgtcctcattatgtcataagatgtaaccacttacagctataaacttccttcttagttctgcttttgctgtatctcataggctttgttatgttgtgtttccattatcaattgtgtcagaaatttttcaatatttttcttaatttcttcattgagcaactgatcatttgggagcatatttttaaacttccatgtacttacatagtttccaaaatacctcttgtgatcaatttctagttttattccactatggttcaagaagatgcttgatattatttcaattttttttcacattttaagatgtgttttgtgacctaacatatggtctactttttttttttattaaactttaagttgtggggtacatgtgtagaccgtgcagttttgttacataggtatacacgtgccatggtggtttgctgctcccattaacctgtcatctacattaggtacttctcataatgctatccctcccctaacctccaccctctgacaggacctggtgtgtgatgttcccctccctgtgtccatgtgatctatttttgagaatgatccatgtggattagaatgctgtggaaaagactttggattcctaatatccagggagggagacgatgatattactttcaatatcacacgggtgtacacactctctgtgacattgttcctaatatccagtggaagagaggatgatataacacccagggagggagaggatgatattactcttaatattgcagggtgtgtacccatgcctatgatattgttcctaatatcaggagggggagaggatgatattactcagaatatggcagggggtgtacacacactctgtgacatggttcttaatatacaggggagaatgggacaatattactctcaatatcgcagggggcgtacaaccctgtgatttgttcctaatatacaaaaggggacagtatgatattgttcctaaaatcgcagaaggtgtacaacgccctgtgatattgttcctaatatccagggcgggagaggatgatattacccccaatatcacagggggtgtgcactttccctgttacattgttcctatgatccgagtggggggaaatgacattagtcccaatatcgcaggatgtgtacactactcccccatgatattgttcctaatatcaagggggagagaggaggatattactcccaatatcgcaagggaggtacatcctccatgcaatattgttcgtaatattcaggaggagagaggaagatattactctcaatatcgcagaaagtggacacccaccctgtgatgttcttcataatatccagggaagcagacgattatatgactttcaatatcgctgggagtgtacatcccttttgggatattgtttctaatatccaggaagggagaggattatattacttccagtattgcagccagtgtacacatttcttgtgatattgttcctaatatccagaaagggaaaggatgatattactcccaatattgcaggtggtgtacacccccctctgatattgttccttacatcaaggaaaagaaagaagaatattactcccaatatcgaagagagtgtacacccctcctgtgatattgtatttaatatccatggggaaagaggatgttgttactcccaatatcgcagggggtttacacccacactgtgatattgttcctaaaatccagtgaaggagaaaataatattgctcccaatattgcagggtgtatacaggccctcccccgttatattgctcctaatatccagcggtggagaggatattactttcaatttttgcagggagtgtgtaccccctctctgatatttttctaatatcaaggatgggaaaggatgccattactcccaatatcgcaggaggtgtacatgccctgtgatattgttcctaatatccagggaggtagaggatgatattactttcaatattgcaggggctgtacaccctctatgatgttgttattaatatttaggttgggagaaaatgatatttttcctaatatcctgggaaggaaaggatgatattactgtaaatattccagggagtgtacaccttcctaatattctaatattgttcctaatatccaggggtgggagaggattatattactcccaatatcgcagtgggtgtacacccctcctgtgatgttgtttctaatatccaagcgaggagaaaatgatatcactctcaataccgcagggggtgtacaccttccccatcatatcgttcctaatattcagagggaaagaagatgatgttactttcaatatcgcaggggttgtacacaacccctgtgatatttctcctaatatccaggaagaaagaggatgatattgctcccattatagcagacggtatacgcctccctgtaacattgtttctaatatcaagactgggagaggatgatatcacttccagtatcgcaaggggtgtacacctcccccgtgatattgttactaatatccagggggaagaggataatattactttcaatattgcaggggctgtacacccccgtgatattgttgttaatatttaggttgggagaaaatgatattagtccaaatatcgcagagagtgtacacacttccgataatattgttcttaatatccatgggggagacgatgatattacacccaatatcgcagggggtgtagtctccccttgtgatattgtccctaatattcagggaagtaaacgatgatgttagtgtgaatattccagggagtgtacaccccctttgtgatattgtcctaatatccgcaggagagaagataatattactcccaatatcgcagggggtgaacacaccccctgtgatattgtttctaatatccaagcgaggagaaaataatattactcccaatgtctcaggggatatacaccttccctatgatattgtttctaatattcaggtggaaaacgggtgatattactcctaatatccaggaagaaaggggattatgttactccccttatagcagggggtatacacctcccctgtaatattgttcctaatatcaaggctgggatatacgtggggggaaggatgatattactcccaatatcacaggggttataaaaccttctgtgatattgctcctaataaccatggcggaagaagatgatattactcctaatattgcaggaggtgtacactcccccattatgttgttcctagtatgcagaaaaggagaggatgacattattgccaatatcgcagggtgtgtacaccacccatgatattgttcctaatatttagagggacagaggatgatattactcccaatatcgcagggggtgtacacgcatcccctgtgatattgttcttgaaatcgaggggaaagagaattatatttctctaaatattgcagagggtgtacaccgccccctgtgatattgttcctaatagccgggggcggggggagataattaaattactttcaatatctcagagagtgtacatcccccttgtgacattgttcctaatatccagagcaaaagagaatgatattcctcccagtatcgcaggaagtgtacatttaacctgtaatattgtttctaatatccagggggaagagaatagtaatactcccaatatcgtaggggttgtacaccttttctgtgatattgttgcaaatatttagaagagagagagaatattactcgcaatatcacagggaatgtatacttcccctgtgatattgttctaatatctagaaaaagagaggataatattactcctaatattgcagggggtgtacacccccacttgtgatattgttcctaatataaaggaaggtcgaaaaacaaacggggagcccagggggaaggaaggcaggcgaggaagaggcagcgccggggcgccggagggagcagccgggccgcggaagcgcgagcacgagaccggtcgcggtcgcagtcgcatttttgccgttgtcgcggccgccgccgccgaggcttacccggggatgtctgagcccgcgcctcgcggcccccaagctccacgctgcgcccgctgtcccggcctctaagggccgccacgtccctgcggcgcgcgcaggcagaaagcggcttcgtgccggcggagggggcccgggcgggccgggaaaggctgccccaggccccgcgcctaccccatcaccgcggccggcgccgggccgggaggatgagcggtgtggggctctgaagcatggagggggttttgtacaagtggaccaactatctcacaggttggcagcctcgttggtttgttttagataatggaatcttatcctattatgattcacaagatgatgtttgcaaagggagcaaaggaagcataaagatggcagtttgtgaaattaaaggtgacagctttggaggggaccacccttgattggatacataaattctgttcattcagcagacaacacaagaatggaattaatcattcctggagagcagcatttctacatgaaggcagtgaacgcagctgaaagacagaggtggctggtcgctctggggagctccaaagcatgtttgactgatacaaggactaaaaacgaaaaagaaagaagtgaaaccagtgaatcgctgaaaaccaaaatgtctgaacttcgcctctactgtgacctcttaatgcagcaagttcatacgatacaggaatttgttcaccacgatgagaatcattcatctcctagtgcagagaacatcaatgaagcctcttctctgcttagtgccacgtgtaacacgttcatcacaacgcttgaggaatgtgtgaagatagccaatgccaggtttaaacctgagatgtttcaacggcaccatccggatcccttagtttctcctgtgtcaccttctcctgttcaaatgaggaagcgttctgtcagccaccctggttcttgcaccagggaggagtagccactgtataaaagaaccagtatctgcacttcaccgactctcccagcgacgccgaagaacctactcagatacagattcttgtagtgatattcctcttgaagacccagatagacctgttcactgttcaaaaaatacacttaatggagatttggcatcagcaaccattcctgaagaaagcagacttatggccaaaaaacaatctgaatcagaagatactcttccatccttctcttcctgaagaaactgtagtgtccaactttctctaagtattgctatgcaaaagctgctgtaattgaactattgttatagggagtagttttttcccttaggactctgcactttatagaatattgtaaaacagacaaacaagaaaacaaaccacatacttttgaagcgtgttttatctttatatagtttgtttgcaagagtattttcctaataacttcacagtatgaatgtgcatcttttttttctttttttaacaaatgatggtgtaacattttgacatccataaggacaaatgtagatatttttctaaaaaaccgtgaggggactgacagcttggtcagggtgtattgtagcttataaacatgaaatcttacaaggtttcagtttgacagaagtgtgatatatgtaacttgtgccatggaccaaatggtcactttaccacagctaaaaatgagttatgatagcagcttgatggtgattgcattgtattcctttaatcaaaaaggaaacgcaatattctaagtatctttagcccaaataccatgacatattgagcatctttaaataaccagactgtattgtccttcatatgtgaagttgacactactgatttgtcaataccaaattttgggttaaagtgtttaatttttatttatttattttcttgttgcctcaaaagatgattgcattctaacttttgtgacctaccaaatttaagatgtgtatacattgttctttacgttgttctagaaaagagattttaatgctgtagtgacttagctcacttacatcagagaaataaacaactttcaatggaaaaaaatatatataaaggaaggaagaggatgatattacttctcatatagaaggggttgtacaccccccttgtgatattgttcctaatattcagggagggagaggattatattactcccaatatagcagggagtgtacacccccccccccgtgataatgttcctaatattcagggaagcagaggatgatattactttcaatatcacagggggtgtgctgtccccctgttatattgttcttaatattcaggggggagaggatattattatgcccgatatcacaggagaagtacaccccacaagtgatattgttcctaatatccaggggtaaagaggatgatatcgcaggtggtgtacacccctccccgtgatattgtttctaatataaagaaggagagagcatgatattactcccaatatcgctggaggtctacaccccccttgtgatactgttcctaatatccaggaagggaaacaatgatattgctgtgaatattccagggggtgtacacccctttgtaatattgttcctcatatccagggggtagagaggatgatattactcccaatatcgcagggggtgcacggccccactgtgatattgtttttcatatccaggaggggagaggatgacattactctcaatatggcagggggcgaacaccccctgtgatattgtgctagttaggttgggagaaaatgatattactcccaatatcgcagggggtgtacaccgctcctgtgatattgttcctaatatccatgacgggagaggatattactcccaatatcgcagggggtgtacctctcccctgtgggattgttcacagtatccaaaagggaagaggatgatgttactcccaatatcacagggagtgtacaccaccattgtgatattgttcctaatagccagggaagaaaacgatgatattattgtgaatattacagggggtgtacacaccccctgtgatatggtttttaatatacaggttggaaaaggatgatattactcccaatatcacaaaaggtgtacacacccccccatgatattgttcttaatacttcggtggggagaaaatgatattagtctccatatcacaggggtgtgaactcctccggtgatattgtttttaatatcaagaggggaggagatgatattgctttcaatatcgctgggggtgtacatccctcctgtgatattgttccttatatccaggcgaggggaaaataatattactcccaatagtacacaccccatgtggtattgttcctaatactcagggggaaagaagataatattactttcaatatcacagggtttgtacacctttcctgtggtatagttttcaatatccagggggaaggtacatgatattactcccattgcagcaaggggtgtacacacctcctgtgatattgttcctaatatccagaagtggtgaggatgatattactcccagggggtgtacaccccacctatgatattgtttctaatatccaggggaaaagagtgtgatattatgcccaatatcgcagagggtgtacacttatcctgggatattgtttctagtatttggggagggaggagaggatgctattattctcaatatcgcagaaattgtacacccccgctgtgatattcttcataataatcagggaaaaagaggatgatattactaccaatattgcagggggttacacttcccctttggtagtgttcctaatatccaggaagaaagaggatgatattaatcccattttccaggaagtgtacacccaccgtgtcatgttgttcctaatatccagcagggaagaggatgatattactcccaatatcggagagggtgtacacttcccctgttatattgtttctaatacccagggggaagaaggatgacattactgccaatatcacagggtgtgtaccccaccctgctattgttcctaatattcaaaaggaaagatgaaaatattactcccaatatctcagggtgtgtacacctctcctgtgatatcgttcctaatatccacaggaagagagaatattactctcaatattgcaggggggtgtacacccccctgtgatattgttccaaatattcgggcggggagaggatgatattagtcccaatatcgcagggggtgtgcaccaacctgtgatattgttcctaatatccatgcgggggaggacgatatcactctcaatgtcgcaggaagtgtacacctctcttgttatatttttcttaatatccaggagggaaaagatgatattactgccaatatcgcagggtgtgtccaccccccttttatattgttcctaatatccaatggaaaagaggatgacattgctctccatatcccagaaggtgtacaacgcccctgtaatattgttcctaatattttgggggaagagaggatgatataacttataatatcacaggaggtgtacaccacccctatgtattgttcctaatatcctttaagggagaggatgatattactcccaatatctcaggtggtgcctattccccctgtgatattgtttttaatatccaggggaagagagtatgatattacgcccaatatcgcagggggcatacaccctctctgagatattgttcataatatatagagggagagaggatgatattacttccaatatcagaggtggggtacaccccccggttatattattcttgatatccaggaggggagaggttgatattactggatatatagcagggagtgttcacatcttctgtgatactgttcctaatatccagaaaagtagaggatgatattactcccaatatcgcagaacgtgtacacctccctgtgatattgatcctaacattcaaaggggagaggatgatattactcaaaacatcacagggcatgtacactcccctgtgatattgttcctagtatccagaagggagcaagataatattactttcaatatcgcagggggtgtacacccctctttggtatgtttcctaatatccagaaggaaagagggtgctattactttccatattgcaaggggtgtacacccccctgtggtatggttcataatatccagggagggaaagggtgctattattccccatatcgcgaggcatgtacaccctgctgcggtacggttcctaatatccagggggaaagaggatgctattacttcccatatcgcggggtgtgtacacccccgtgtggtatgttttgtaatctccgggaacgaagagggtgttattacccctcatatcgctggaaatgtacactcccctgtggtacggttcacaatatccaggggattgagggtgctattactccccatatcgcggggggagtgcacctccctgtggtatggttcgaaatatccagggtaagagagggtgctattattccccattttgcaggaggcgtacacccctctatggtatgttttgtaatatcccaggtaaggggtgctattgagagaagagagcaaaagaccccccccatattgttctgtattattttatactcagtacctgttttaagaagaaacaaggaagcgaaaccaaaggcaggcagcccggcgccaggcaccagatccaaaaccagacccgaaaccaggcctgggccttcctgaccttagcctgaaagttaaaattcaacccatgacctagcaactgatgttatccatagattccagacattgtatggaaggacattgtgaaatttcttgttctgttctgtttcactctgagtactggtgcatgcagcccttgtcacatacccactagattgctcaatcaatcatggccctttcatgtaaaaaccttagtgttgtgagcccttaaaaaggacagaaattgtgcactcaacaagcttggattttgatactctagtctgctgatgcttccagctgattaaaagccacttccttcactacctcggtgtctgtgggattttgtccgcggctcctcctgctacactgtgactccccttatagagaggggtgtacacccccctttggttcctaatatccagcgggggagtaggtgctattactccccatattgcggggagtgtacacccccttgtagtacggatcgtaaaatcaaggagggagagaaggtgtaattatccccatatcacagggagtgtacacccctttgtggtatagtttgtaatatccacgacgggagagaatgctattactccccatatcgtggagggtgtacaccgccctgtagtatggttcgtaatatccggaaggggagaggttgctattactccccatatggtgggaagtgtacacccccatgtgatatggttcataatatccaggggggtagaggatgatattacccacaatatcatagaaggtgcacacccttttgtgatattgtccataaaatccagaaggggagaggatgatattacttccaatatcacagggggtgtgtagccccatatgatattgtttgtaatatcaaggtagggagaggatgctattccttacaatagctcaaggggtgtaaccttcttgtgatattgtttgtaatatccagaaggggagaagataatttttttattttaaaagtaaactttaatgtcaaaaatgcaaacttgagaagggcagaaagatcaaacagaaggctgccacttcacaattggagggttgcacagtggccgggcagaggcgctcctcactccccagacggtgaggcagccgggcagaggtgctcctcacttccgagatgttgcaggagccgggcagaggtgctcctcacttcccagaacagggggctgccgggcagaggtgctcctcactgcccagacggtttgcaggcctggcagaggcactcctcacttcccaaacggagcagcggcaagccagaggcgctccacacttcccagatggtggggcagccgggcagaggcgatcctcacttctcagagggtagggcggcccagcagaggcgctcctcacttcccacatggtggggcggcaggctagaggcgatcctcacttcccagacggtggtgtggccatgcagaggtgctcctcacttcccagatggtgtggccgccgagctgaggcactcctcacttccctgacagtggggcggctgggcagaggcgctcctcacttcccagacacttggactccgggcagagactctcctcatttcccagatggtggggctgccgggcagaggcgctcctcacttcccagacggttcagaggccgggcagaggcgctctggggagaggataatgttactcccaatatcgcagggggtgcacactccctgtgatattgttccgaatatccagagggggaaaggatgatatagctcccaaaatcgtggggagtgtacacccccctgtgatcttgtttgtaataccaagaagaaaagagaatgctattatttccaatatagcagggggagtacaaccccctgtgatattgttcgtaatatctagggggagagaaaattatattagtcttaatatctcaggggacgttcatccccctgtaatattgttggtaatattcagaatggagaagatgatattgttcttaaaatacaggaaaaaatatgataatattacttccaatatcgaagggggtgtacactctcctgtgatattgttcccaatatccagaatgaaagaggatgctattactcccaatatcccagggagtgtacacccctttgccatattgttcataatatccaggggaagacaggataacattactcccaatatcaccgggggtgtccacccactagtgatatttattgttcatcatatccagaaaaggagaggatgatattactcccaatattgcaggtggtgtacggtccctgtgatattctttgaaatatctagaaaaggagaggatgatatcactccgagtatcacagggggtgtacacccccctgtgatattgttcgtaatatccaggggagaaaaggatgatataattgccaatatttcaggggatgtgcacctccctgtgatattgtttgtaatatccaggggtggagaggatgatattactcaaaataacgtaaacatcctgtgtgtacatcccctgtgatattgtttataatatccaggggggtagaagatgacattacccccaatatcacagagtgtacacacccctgggatactgttcataatatccaggcgggaaagaatgaactacttccaatatcgcaggatatgtacacccccctgtgatatatttcctaatatttatgtgggtaaggatattacccccaatatcacagaaggtgtacatcctctttgtgatattattcctaacatccaggaaaggagagaatgatattactcccagtatcgcagggggtgtacaccacccctgtgatattgttgctaatatccagggggagaggataatattactcccaaaatcacaggggacgtacactcctcctgagatattgttcctaatattcatggggaaaagaatgctactactccaaatacagcagagggtgtacaccatccccgtgatattgttttttatatccaaagggtgaaaggctgatattactcccaatatcgcagggggtgtacaggccccccatgatatcattcttaatatccagggaggcaaagaatgatgttactcccaatattgcaggctgtatacaccccccgtgatattgttcctaatatccagagtaagagaggatgacattgctcccaatattgcaggggttgcacgcacgccctgtgataatattactcccaatatcaacagtgggtgtacactcctcctgtgatattgtttgttatatctaagaaagaagaggatgatattactgtcaatatcacagaaggtgtacagccccttgtgatgttgtttctaatatccagcggtgagaggatggtattactcgcaatattgtagggggtgtccaacggccctgtgatattgtttctcatattcaaaaaggaaaagaataatataactccaaatatcgcagggtgtgtacacttccctgtgatattgatcctaatatccaggaagagagaggatgatattaatcccaatatcacagggggtgtacatcgcttctgtgatattcttcctaatatccagggggggaggggatgctattactcttaaaatcgcagggaacttacactcccactatgatatttttcctaatatccaggaagggagaaaatgatattactcctaatatcacatatcacaatgggtgtacatctccccgtgatattgtttctaatatcaaggatgggagaaaattatattactctcaatatcgcagggggtgtgcacacctcctgtgatattgttcctagtatccagcggaggagatgatattactttaaatattgtagaaggtgtacaacccccctttgatattgttcctaatatccagggggaaaggagatgatattactcctaatatcgcaggggctgtacaaccctatgtgatattgtttcttctaatatccaggggtggagaagataatattactcctaaaatcgaaggggacatacactccccctgtgatatttttcctaatatccagaaggaaagaggatgatattactcctaatattacaagaaatgtatacctgtcctgtgatattgttcctaatatccagaggggtaaatgattatattactcccaatatcgcaggggtgtacaccttccctgagatattgtttctaatatgcagtggaggagaggatggtattactcccaacatcacaggagatgtaaactccccttgtgatattcttcctaatgttcaggacgaaggagggtaatattactcactgtattgcagcagggggtgtagagccccctgtgatattgtttttaatattcaaggttggagaaaataatattccttccaatatcgcatggggtgtacacccttctttttatatagtttctaatatctggggggagaggatgatattactcccaatatcgcagggggattacacccccactgtgatattgtttttaatatccagggtgggagaggataatattactccaaatatcccagggctatacaccctccgtgtgatattgtttctaatatccagaggaagagaagatgatattactcccaatgtcacagggtgtgtacaggccttctttgatattgttcttaatatccatgagggagaggatgatattactcccaatatcgcaaagactgtacaccctttctgtgatattgcttccaatatccagggagggagaggatattacactcaggatcacagggggtgtacaccccaacctgtgatattgtttctaatatctagggaaaatgagggtgatattactatcaatatcacaggaggtgtacactcccttatgatattgttcctaatatccaggagaatgacaggataatattactcccaatatcgcgggtggtgtctccccccactccgtgatattgttcctaatacccagagggggagagaatcatattactcccaatatcgcaggggatgtacacctacatccggcggagtagaagataatattactcacaatatcgcaagaagtgttcaccttccctgttatattgttgctaatatccagggagtgagaagatgatattactttcaatactgagcgtgtacactacccctgtgatattgtttctcatatccagtagaggagaaaatcatgttactcccaatattgcaggggtgaacacctcctttgtgatatttttcctaatatcaggaaagggagagtatgatattacccttaatattgacaggggtgtacacccccctttgatattgttccaatatccaggggggcagaggataatattattcccaatatcgcagagggtgtacaccccccgtgatattgttcctaatatccagagaaataaaaaatagtattatttccaatatcacagggcgtacattttccctgtaattttgttcctaatatctggggggtggggtggcaggataatattactctcaatattggagagggtgtacacccccctgtgatattgttcctaatattcagggtgggagagaatgatgttactcccaatatctcaggagtcgtatacacccccttgtgatattttttctaatatccaggaggcagaggatgatattgctcccaatatcgcagggggtatacacccgagctgtgatattgtttctaatatgcaatatgggggaaggatgattttactttcaatatcgcagggaatgtacactttccttgtgattttgttcctaatatccaggggtggagaagatgctattactatattactcctcatatcgcaggcggtgtacaactccctgtgatatggttcagaatatccagagtgaaaaaggagggtgacattactcccaatatcgggggggtgtacacccctttgtgatgtggttggtaatatccaggggggcagatgagggtgatatcactccccatatcgtggaaggcgtccacttttttgtgatgtggttctttatatcccgaggggagaaggtgatattactccccatatcgcgaagggcatacacccccctgtgatatagctcataatattccggagagtggaggaagatactatgccctatatcgcgggtggcctacaaccccctatggtttggcttataatatccaggggggagagggtaatattgctccccatattgtggagacgtacagccccctgtgatatggtttgtaatatctttggggggcgagggtgatattactccccatatcgcggggagcatacacccccgtgatctggttcatagtatctcaaaggaagaagttgatgtgtacaacttaagggaaaaagttgaagtgaagtgtacacacgccctgtgacgtggttcataatatccaggcgggggagaggagagtgatatttactccccatatcgcgggtgttgtaaactcccctgtgatatagttcataatatccaggggagagaggagggtgatattgctcctcatatcgcgaagggtgtacaaccccctgtgatatggttcataatatccagaagggtagaggacgatgatattactccacatatcttgggaggtgtgatatggttcgtaatatccagcgatgagagaatgatattactccccatatcgcaaaaggtgtgatagggtttgtaatatcctgagggggagagggtgatattaatccctatattgcagaaggactacaccctcccatgacatggtttgtaatatcccagggggtagagtgtgatattactttccatatcacagggggtgtgatatgattcgtaatattcgaagggggagagggtgacactactctccatatcacggggtgtgtgatatggttcttaatatcccaggggttagaggttgatattaccccctttttggggggtgtgtacaccccctgtgatatggttcgtaatatcccgggggagacagggtgacattattccccatatcgaggggatcgtacaccccctgtggtgtggttcataatatccctagggggagatggtgatattactccccatatcagggggcgtgcactcttctgtggtataattagtaatatccagggggcagaggtcgatattcgtttccatatcatgaagggagtacacttccctgtgatatggttcctaatatccaggggggagagggtgatattattccccatattgcggggggacatacaacccctgtgatatggttcataataaccagaaaagaagagggtgatattaatccccgtattgcagagggcatacaccccccctgtgatatggtttgtaatatctaggggaggaaaaggtgatattactttccatattgctgggtgcagacacccctttatgatatggttcataatatccaagttggagagggtgatattacttcccatatcatgggaggtatacccttccctgtgatatggttcgtaatatccagaaggggagagattgatattactccccatattgtggggggcgtacaccttcctgtgatacggtttgtaatatctaggggatatagtgggtgatattactcaccatatcacgggggttgtaacatggtttgtaatatccaggggaggagagggtaatgttactccccatatctcggggcatgtacaccctcctgtgacatggttcgtaatatccaggtcgggagagggtgatattactcctcatattgccgggggtgtgttatggttcataatatcctggggaaggaggctgctatcactctccacatcttgggggatgtacactctcctgtgatatggttcataatatccagggtgggtgagggtaatattactccccatatcgcgggaagtgtacatacccctgtaatattgtttgtaatagaagagagggtgatattactccccacatcgcgggtggtgcccacccccctgtgatatggtttggaatatccagggggatgaggagggtgatattactccccatatctcggtgggagtacatccctctttgatcaagttcataatatccaaaaggaaacaggagagtgatattactccccatatcgccgggggtgtacacgggagggggagtacacccccggcgatatggtctgtaatatccagggaaggagaggagggtgatattactcaccatatcgcaggtggtctacatttacctgtgaaacagtttgtaatatccagggggggaaatgagaatgattttttttttttgagtctcactgtgtcacccaggttggagtgcagtggcacgatcttggctcactgcaacccccgcctcctggactcaagcaattctcctctcccagcctcctgaatagctgggactacaggcgcaccccacaacgtctggctaatttttgtatttttattagagacggggtttcaccatattggccaggctgatctcgaactcctgaccctgtgatccatccgcctcggcctccaaaagtgctgagattacagatgtgagccaccacgcatggcccaaggagaacgatattactccccatatcccagggggtgtatatccccctgtgatatggttcagaatatccggaaggaaagacagggatattacttcccatatcgcaaggggtgtgacatggttcgtaatatcccatgggggagagggtaatattactcttcgtattgtgaagggcatacactcccctgtgatacagttcataatattccggggagtagaggaagatattatgctccatatcgcgggtggcataagccccctgtggtttggttcataatatccagggaggagagggtaatattactccccatattgtggggacgtacaccctcctgtgatatggtttgtaatatcccagaggggagagagtgatattactccccatattgcagggacatacacccccctgtgatatggttcaaaatgtcttttttttttgaaggactggttctttatttcaaaaagacacttgtcaatattcattatcaaaacagttgcactattgatttctctttctcccaatcggccccaagtagaccacatcaaaggagagtacatattaagccaataagctgtaggatgtacacctaacagacctcctagaaaccttaccagaaaatggggacagggtagggaaagaaactttaaaagatcaacaaactgccagcccacggactgcaggggctgtcacagccagatggggtggccagggtgccacaaacccaaagaagcaaagtttcaaaataatataaaatttaaaaagttttgtacataagctattcaagatttctccagcactgactgatacaaagcacaatgagatggcacttgtagagacagcagcttcaaactcagaaaagggtaatgagatgagtttcacatggctaaatcagtggcaaaaacacaatcttctttctttctttctttctttcaaggaggcaagaaaagcaattaagtgctcacctcaacataaggggaacatgatccattctgtaagcagttgggagggggtagagatggaacaaaattttggtctcagaggtcttgccatcttaatttggtcacttctaatgaaaaaaataaaaaatagaaataacattatccaaaggtatcttaaagctgaaaacttgaacagcacattttttgttgttgttgtttggctaactcctcctggaaccacctttctggcttagctagtactttgtacagagcaatgaggcttcccatagtggagtctccctgggctctgtttggctctcagcaaggcaggcctataccttttcctctcctccatggagagaggaatatgcattaaggtgaaaaatcaccttccaaaagtgagaaagggattcgatcgctgcttcagggctgtggtattatatggaatgttttacaaaaggttgctacaaaacaacaaaagaggtaattacaaaatgtgtacatcacaacatactttttaaagacattatgcattgtgctcacattcccttaaatgttgtttccaaaggtgctcagcctctagcccagctggaatctccgggaagaggcggacagtttggtgaaaaagacacagggaaggagcgggcggcggaaggagggggcggcgaaaggagaaagcagccttccagttaaagatcagccctcaattaaaggtcagcttcgggcaggctggcctcaggcggagtctggttcagagggaggagcagcagcagggtgagactgaggcgttctacatctcattcaggtcaagcagagtctggtccagcatcctttgtgtacagaggtgctcccctttggtgcatttcagtttatcttccaagtcatcaattgtcttttccagcttggctaccgatctctcagcaaactcagcatgggtctccgcctcctttattttatcagtaagaatcttgatctcttcctcatatttgtcttctttttgagagtacttttcttcagcagcactcagacacttcaggttctggtccatcagtctaatctgctcatccatctctcggcaaagggattctgccagctcagctcgttcctctgtgcgttccaagtctccttcaatgatcaccaacttacgagccacctcttcatacttcctatctgcctcttctgcaatgtgcttagcttctctgagttggatttcctggagttccatcttttcttcatcttttaaggcccggttttcaataaccttcttacctctctcactctcatcagcagctttttccgcttcttccagcttttgcagggcagtagccaggtgctcctgagcacggtccagctcctcttcaaccagctggatcccacgttcaaggaggccacctcagcctcagcctgttcccgggcccacctttctccctcaacttctcgctggaggcgctcagctcgctcctctgcatcatctgcctgctgctgcagaacctggatcttgcgcttcaccgcctcgatggtggtgatcccagccatggtgcccacccagctactgctagagctccggttcctgcctcctccgatcggcgttgcagcctcctctcacccttacttccgcctcggttcaaaatatcttaagggaaggagttgatattactccccacatcacgggaagtttacatcccctggtgatatggtttgtaatatcccagggtggatagggtgatattactctccatatcgcgaaggagtactcccccctgtgatatggttcataatatccttggggggagagtgtgatattactccccatatcgcgagggccatatactcctttgtgacatggttcgaaatatcccggtgggggagggggtagagggtaatattactccccatacagcgaagagcatacgcccttctgtggcaaggttagtaatacttcagggaaaagagtgcaatattacttttcatattgcagggaacatacactcccctgtgacatggttcgtaatatcccgggggctgagagggtgatatttctccccatatcaccgggggcctacacctgggtgtgatatggctcataatatacagggagggagagggtgatattactccacataccgagtgaggggttacacaccctcgtgacatgttcgaaataccccaaggaggagacaatgatattactttccctgtcgcgggggctacaccctcccagtgatatggttcacaatatcccggggtggagagggtgatattactccctatatcaccggggggtgtacacttccctgggaaatggtttacagtatccccggggggagagggtactattactccccatatcacgttacatatcagggtacacccccacgtgatatggtttgtaacatcccaggaggaagaaaatgatattactccccatatcgcggtggcatacacccctccccgttaaatggttcataatatcttggggtggagagggtgatattactccccatatcacgtggggcatacaccccactatgatatggttcataatatcccggaggggagagggagatattactctccatgtcgcggggggcatatacacccctgtgatatggtttgtgatatcccgggggcggagagggagatattactctccatatcgtggggtcgtacacttttctgtgatatgattcgtaatatccagacggggagagggtgatattacttcccatattgcgggggcgtacacccctctgtgatatggttcataatatcccgaagaaaagagggtgatattactcctcatatcgcggggaacacacaccaccctgtgatatggtttgtaatattcagcgggggagagagtaatattactccctgtatctcggatggcgtacactcccctgtgatatggttcataatatccagaagaaaagagggtgatattactccccatattccagggaatgtacaccaccctttgaatatggttcgtaatatccaggaggggagagggtaatattgctcccaatatcgaaggaggtgttatacggttagtaatatccagagaaggagagggtgacattactccccacatcgtggtgggtgtgcacccacctgtgatatggttcataatattcaggttaagagaggtgatattgctttccatatcgccaagggtgtacactcccgtgaaatacagttcgtaatatccaaaaggggagagggtgatattactcccatatcgtggggggtgtacacccctctgtgatatggttcataatatccagggtggaataaggtggtattactccctgtatctcggggcatgtacatcgcctgtgatatgattcataatatccagaagaagagagggtgatattaatctccatattgctgggggtgtacaaccccctgttgtatggtttgttacactgagttggggagagggttacattactctcaatatcgagtggggcatacacacttatgtgatatggttcataatatcccagggaggagagggtgatattactccccatatcgcgggaggcatacaccccaatgtgatatggtttgtaatatctacatttttttttttgagacgaagtctcgctcttgtcccccaggctggagtatgatggccggatctcggctcactgcaacctcagcctcccgggttcaagcgattctcctgccttggtcccccaagaagttgggattacaggcgcacaccaccacgcccggctactttttgtatttttagtagagaaggggtttcaccatgttggccaggctggtctagaactcctgacctcagatgatccacctgcctcggcctcccaaagtgctgggattacaggcgtgagccactgcacctggcctggtttgtaatatctatgaagggggaaggtgatattactttccatatcacgggaggcgtacaccacgatgtgatatggtttgtaatatccagggggtatactgggtgatattactccccatatcgcggggagtgtatacccttttgtgatatggttcctaatattaagctgaggagaaggtaatattactccccatatcgcaggggtttttatatggttcataatattcaggaagagagagggtgacattactctccatatcacggggtgtgtactcccccatgtgatatggtttgtaatatccagggaaggagaggttaatattactccccatatcgcagggggtgtacacctctctgtggtttgtaatatccaaagggaagaggatgatattatcttcaatatcttggggggatacagtccccagtgatattgttcataatatccagagggggaggggatgatattactcccaatattgcaggtggtgtacaaccccctgtgatattctttataatatagagggggatgatgatattactcccaatatagtaaacaacctgtgtgtacaccccctgtgatattgtttataatatccaagggtggaaaggatgatattactcctcatatcgcagggggtgtatacccctctgtgacattgttcctaatattcaggggaggagaagatgatactactcctcatatcacaggggatgtacacccccctgtgatacttttggtaatatccaggggaggagaaaattatattattccccatgtcacagagggtgtacaccccgctgtgatagtgttcataatatccaggtgaaaagaggatgatattactccgaatatctcaggaagtgtacacccttctgtgatattgttcataatatccaaaggtggagaggaggatactactccccatatcgcagtgggtgtacacccccctgtgatatggttcataatatccaatgtaggagaggatgatattactttccatatcgcggagagtgtacatccccctgttatattgtttgtaatattcagggagaaagaggatactactactccccatatcacacggggtgtatattcccctgtgatatggttcctgatatccaagagatattataatcctctcttggattatgctacctctcatatcgcatggggtgtacacacactttgtgatatcgtttgtcatatccaaggagggagaggattatattaatcccaagatcacggggggtgtacaccctcctgtgatattgtttgtaatattaaggggggagaggataatattactcccaatataattaacaccctgtgtgtactcctccttgtaatattgttcataatatccaatgggggagacgatgatattactttcaatatcgcagaggatgtacatccctttgtaacaatgtttgtaatataaaaggcaagagaggatgatactacttccaaaattgcaggacatgtacaccccccggtgatattgttcctaatatccagtggggaagaggatgatagtagtcccaatatcgcaaagggtgtacacaccccctgggatattgttcctaatataaaaggaggagaggatgctattattcccaatatcacagaaggtgtaaaatcccctgtgatattgttcgtaatattcaggaggggagaggattatattactcccaatatcacagggtgtgtacacagggaggggcaagggccagaagcgggcgggaatccccatgtttgggcggacccagtttctaatggccagcatttgccaatcaaagcttaccagagaactctaaaagccagggctttcctgctagacaagactcatttctggaactgctttaaaaagaaacaaaacttcccaaggaccccttttcctctctgtctgcctaaaataatgttttaaaaactcctaaagcagctgaattcagcccccttcctgggggaatgtatagacggaactcccacctttcccggcatcccaaggccagagtatgtgaaactcctgggtctctatgtgtgtctgagcggctgctctgccaacactccacacagccctgtgtcctggacccaaggcccttatgacctgagctcaagaggggatctcctgatccatgggttgcaaagatccatgggagaagcatggtttctggggcggggtcacacgctcagtcactgtttccctcggatgccggagatggttcctttggctctctgccaatacagggtgaatcatcatccatccctcttttctttgttctcccgggtcaagttgtttgcctagtcagtcccaatgtgagaacctgaatatttcagttgacgcgctgacttcaaaatccccgggcttcgggaggcggagcttgcagtgagccgagatcccgccactgcactccagcctgggcgacagagcgagactccgtctcaaaaaaaaaaaaaaaaaaaaaaaaaaaaaagtccccgggcttttcttttcactcagtggaaggcagctgcttctaattggccatcttggcccgcccccaccacgtgaccttctgtaaaatgcctccactctccaggaacgctctcattatataactttgcctgaaaccaacagcacgctcattgcacatatcatgggctcatttatttcacttataaagaacctggccaaggaagagatagtgcctaaagtggccagtattctgaccgatatgttagaaaaatggtgtgccgaccaattcatgacatgtgtcccaaaactagcaacggaaattgtattcgccgtgttgaggtctctaatccagatgatgctcatctatgtactggaaaaggcagagtcctttcctgacaagctgctgaaactcttcagaaacatctcatatttcctgaagaagatgatgtctggacaagcagcacaggtcgttcagatttaactttctattcatatatccagcacgatattcgcacaattgtcacgaaaccttaccagttgatgagtcctgcacatttcctttaatttcaggaggaagagggtaatccggatgagttttctgacctactctgctgctgtgattaaacaaccaccaggaaattttgacgacactgttctcctgagctcctccctttcctccgggaacaaaacaattgaatttacaaaaataaagtgttatttgactggagtgaggtctcatgtctgcttatgcggtggctcgctgctcagaacagggtgagtctctgggttgtgtgctgaggaggggaggctctcaatctggagaaaacccactgcaggggacacctccatggggtctgagggactgaggatgaggagccggactgggtctagggaaggaggaggtttcagagggtgaaattctggcactaaagcctgggggtgtttgggaacttcctccttccgaagaagtttcagggagggataaagacaaaccctgggctccttgaggggcccttactaatttgagaggactctatcgggaaggagagtgacaatggcctccttgaggactgaggcccctgaataaatgaggcccagatacagtccatgggggatgagaccttcaagggtcacattttggttgggacagaggaaaagtgcagctctgcagccgcagaggaaaacccggcagtgtgaaagcgaccttggaggggccctgtgcgctctgaatgcgtctgagcccccatcccctgtccccgcctctctttctggattcttccagctcggctgtctccgccatcttctgagcgctccaccctgacttattcaagtttcccttctgccttccaagtactccaaaatctttcagatctgtgtccctacccctgtttttagcatgtgttggggctccaggtccctgaaggtttctggcctgaaatccacctccccagcggagtggactgcgttctagagactccacactccgcgaggttcccaggcccctgagggacaaccgagtggcctgcgcacttcagggctccacactcggcaaggtctttcaagcccttggggtccccttcttagttttttccacctttctgggctgcagtcactccataaatgctgggatctgatccccacccccactctcgtttcctcaattctgcgggctacacgctctggcaaggtcctccgggccctggatcccctccctctccctatgcccacgctcctagtcagcccttctggggtccactattttcaggaactaaccgttctcatggagccttgctaaccggaaagctgtgtggaagaaaggctttgaggatagaggtggagatttggctcttccatagtgccactcacccaccccaccatgctgccactgccagacccggacccctgtttcagaacaagtgaccagattcgctcctggacagccctggacactggccttttctctgaaaactactcaccctttctctagtccccacttcatgccagcctcataccctcttccttcccccacgctggcttccgggatcctcctctgctcagacaacctcttctgtgtcccacccccgtttttagaatgctttggggcaccaggttgggggaaggtttctggcctgatatccatctctttccaaactcccttcttcccttgaaaggcttcttgccttcagccccacttctggctccgaggtttcaggacaccctcctcttcatcctcattcttttgaccaccagctttttaggaattcgaacgtccctctcatcttcgtgaatcctgtccaggcatttgttgaccccttcatctgatacccctgacctcacattgccaaaagtctacccctacccagtacactggaattagacaaaatcccaggagttttacctcaactctgagtgtgcccacaggagctctccctgaagccacgtccttttaagcagggtctagggttcctcccttgtcttaatgaactctttgtcacacggaggacgttatggagcccttatgatctttcactgcctttctgcccagcgttttgtctttccatggacatttataatattttccatggacattttgttctctcaatgtccacccctaatttccaacatcccaaagattctcatgtgtttcctgaaagccatttacaggaatggctgtgcccagacccccttccccaggatcctccttcacacctggtaggtgcctctcctagagagatttgcactcagttgtcgtgcagtcacatggcccagatggttgttaatcacccccttcctggcaacagctagcagccagggaatcactggcacagaaacctcagggtgaccaagatgaggccacctctgtgctgaaggctgtgctccagagcctgcttgggatcaggcttaagcaggtcttcagccagacctgatgttacctggtttccttgagctgccctgcctgagctatcgggagcactccctcaatgcacatcttgattccctatctcatgctctgcttctagaaaccatgagctatcaattgctactggcaatggtcctgggaagtcaaccctaagtatggattctggggttggatgactccccacaggacttcagtgagcaacaatcactgctggcagttggaggacagagtcgctagggcatgtgaccactgtgaaaccaccgatgtttcacctggggtaattttggatgaactacggtagaagcactgaaggtacattgcttttggtttggaagattgtaggtaaataatagcgatatgaatgtggaattggatggctgcaaacgagtgccattgatgcattgaaagaggaaaagtcaggctgtcacctgtcactcagcaatttaaagtgtgagagttgggactagatgtggtggctcacatctataatccagagattcgggggaagcttgaagaggtaggatcttttgagtccaggagttccagaccagcctggacaccagagcaagacctcatctctacaacaaaattttcttaaaaattagatgggcttggtggcacgcacctgtacttgtagatctagctaatggggagcatgagataaaaaaatcacctgagtcagggacttaggggttacaatgaggtatgattgtgccagtgcacacactcccacctggccaacagagtgagattctgcttccaaaaaaataagaaataaatcaggtttgagagttggaaagcatcatcttctcctagagccaaaggacatgtacaactgagacccaggaacaaagcttcatcacaaagagaccatcatcagtggagccgggagatgcattccccctcaccctgccttgaggaggcagtggagtcatctgtctgggatcctttctgacccagccctatttgtttgtctctttggcttctttggatttgtatattttagctgttataacactgtaaaacaaacagagtgatttttttgagttgtgtgaatgatgctagctccatagtcaccctgagagtgatgggaacttttgaatttgtggcaagttggagggtagtgtaagtgacctgagattgccaaattggggctagcactggatgtgaggttaggctagtggaaaaatatgcccagaaccagaggagtgtgggctcactgcaggtggttaggctcagatccaaattgtacagatggatagctttggggtaaagaataacatagttgagaagtgcatgtgttagtctgttcatgcactgctataaagaattacctgagactgggtaattatttataaaactcaggtttaattgggtcatggttccacaggctgtacaaaaagtatgatgctggccatcagctcaacttctggggaggccccagaatagttagagtcatggcaaaaagtacaagggaagcaggctcatcttccacggccagagctggagcaagtggtaggagaggtgatacacactttcaaacaagtaggtcttttgagaactccatcaccggacagcacctatgggatggtgctaaattattcatgaaatatccgcctccataatccactcaactgtcaccagcgcagccagccccacctccaacagtggggattacaattccatatgaggtgtgggtggggacacagctccaacctcaatcagtgggcatcctggattgggtctactatagaaggagaaccaggagctgactatgatcttgaaccctacccatgatggccgggcggggtgactcatgcctgtaaccccagcactttgggaggctgaggtgggtggatcgcctgaagtcaggagttagagaccagcctggccaacatggtgaaaacctgtctctactaaaaatacaaaaaattagaccggcgttgtgctggatgcctgtaatcacaccactacgctccagcatgggaaaaaataccaaaacttcgtctcaaaaaaaaaaaaaaaaaaaaaaaaaaaaagactgcccatgaccactgcaccagtgagagggacaccagcatcactgagatgcaagggctggacattcttcataggtcagagctcaaagcaggggacactgatacagagatgggctccatccatagcaccaaagtggtgagaggatgtgggaatggcagaggccagcactttgccatcaatgcaagggggtataaggaggtgacaccagtgccagagtacatcacggggggactgccctacaatatctaggacttacctcttagagcgtgtttcattagcgacaacagatataaatggcagacaggtgtgtccctgcattaacaggaaatagaaatcatcaagaggaacagaaggcagatgtcagcagccccttagaaagtcatcatccttcatacagttaaaatctgagacagttctcacacgagaaggcctaactcaaaaagaggctgggttctcatgaggcaggtttatgcaaaaccaaggaaggtgtacaagtttggaattctccagtttcccttggaaaagacctacagtcatttgcttaggtaactgagcactgaacaaaggtgagtattgttgtcttttagaagctcttggccaagaaggccttgttggcataaaacccatggtttggaaacatcaccatgacccctgttagagtaatggcctaagggtgggggtcaggaaattgatgtattccttgccaacttctgcctctaagtgagtgaactctgtttgtgaacctctctcctctgtggttatgttcctaggctctcatgtataatcaggagtcatagacttagaaacaggaaaaatacttacagtgtttttgtggcctgtgagctatgacttataattttaggaaaaaaacaattgcaaatggaaagcctaagtctatcaatgctcatccaagacaacataatcaataaaaaccaatatcaaatctcaaggcaaattatttcctgtatatagatggcagagatgagcaccaccatcaaaaactcaaggaccagtgctgtgggtccagtcatctgtttcatggaattcaccagtctggtatcttcaaaatccagaaggatgatggcagatggcaggaaagtaatgcaaacgtcatcaggtgtgaccccactgtagcagctgtgatggatgttttctctcaccatagcaataaataacacaacctcggtcacactgtatgcattgttggtctgcaaaatccatgttttgcaaaactcttcaggaaggtggatctgtaatattggcattgacatgagaacaacagcagtatttattcacaatctcaagctctctgtcttcccgtctctctcattagccatccaagtagtcctgaggaaccaagcccatcagaacattctgcaacataatacacagctccattctccattcaaattttgttgttgttgttgttgttgatgagacaacatcttactccatcagccaggctgacgtacagtggggctatctgggctgactgtagtcttgagcttccaggctcaaggcatcctctcacctcagcctcctaagtggcttgaactacagacacacagcgacatgctgggctagtttttgtatattttgtagagacgtgctctcaccatgttattcaggctggactcaaactcctgagcgtaagtgatccaagcaccttggcctcaaagtgctgagattacaagcctgagccactgcacccagcccaatctccattctactgataacaatgtcattaccaggtctgatggacaggaaatggtaaggtttctgaaaacctaaggatcacacagcgagttccaaaggctgaaagtgcatacctgtcgacactgataccaatgacatccaatggtgagaatgacattccttgtagtcctagctctgctcataacaaatctatactgaagtgtaagagtttgatggtcatggggattttccatgtctctgcctttcagcgatgtgccatatctgtgaagtgttcagaaatgcaacagcctgaggcatgctgggcatatcctctaataaaaaggaaaatgccattttatggtcctgtatttctacaagttggaacacatgggcctgtgatccagatgggggaaatgggaatattcccactcattcaccttcatccacgaagcccatttgaaagctttgggcttcccatccttgtagattttagtgttgtgggctgggtgcagtggctttcacctgtactgccaacactttgggaggcctagacaggtgaatccactgaggccaaaagttcgagaccagcctggccaagatggtgaaaccccgtccctactaaaaatacaaaaattagcaaggtattggggccagcacctgtaatcccagctgctcgggaggctgaggctggagaatcgcttgaacccaaaaggcagagactgcagtgacccgatcctgcctttgcactccacctgggcaagcagaacaaaacttctgtcttgaaaaaaaaaacaaaaaacgaacaaaaaagatgttagagttctgggtttagaggtctataccccagaaagagaatggtttcaacaagggacaaagaagttgctttaaacgttgacttgccatttcttttcagtgtgtttgttctcttgcgtcaagagaccaccagaaaagtggtgcaattactctcctgtcaagaatcattgactatcatctgcaagagggtcagatcctggtatataattagggcagaaatacttagtctgagaagggtatgacatccagaggccctattaatgatgtccttttctccatgcctgactctgaccccatgtgctggactgcccctgtgtggatggcctcatggcctgctcggactctgaggtcccaccccaagtggcacctccatggagggctctactcttgtatgggctctgacactcacactgagacactctcccatggacacctcttcacccacttggggtctgaaactgggctactccatccctccctaacctggaacagagagctttcactgctattacacaagtcatagaggctaactcctcatttttccaagctaattattgaaacattagtcctgggttgataagacaagataagttaacttttcataaatttgcttatcaagttttgaataaattcaaataaattcaccttccccacacaccttagttgtcgacatcacacgcgcacccatactcacagggtgagcacgaaggcttcactgtcagtggagaaagtggcaaaacccttctgtgcctcatcctggtctagacctggccctcatcctttcccactcttcccctcactcccttggattcatccacactggcctcctgcctgctgctccacctccctgcgaagctcacccctgcctcagggcctttgcacgtgcagtggcttcaagccatatcctcttcacccagatctcccagatctcctgaatgatcttcttttatcattcaggtctcagcttgcatgtaatcttctcagtgaggattacccaaaccacatagttcattcattcattcaaatattcattcaatggcatattgacaaagcagctacttcatgccaggccttgggccaggtgttatggatatggcaacaaacaaaacaagagttttctgctctcaaatttttacccacttaaaggagatatcatacatcatctgtaaataaatacatcatctgtaaataatgatgtaaataaatacatcatctgtaaatctgtaaataatgatgtaaataaatacatcatctgtaaataaataaagtataataaaagaaaatagtaggtttttttggttggaggtgaccgtgaagtttgcaaataccatcttacaacacattattttattttatttcatttcatttttaattttattattattatactttaagttttagggtacatgtgcacaacgtgcagatttgttacatatgtatacatgtgtgaagttggtgtgctgcacccattaactcgtcatttagcattaggtatatctcctaatgctatccttcccccctcccccaccccacaacagtccccggtgtgtgatgttccccttcctgtgtccatgtgttctcattgttcagttcccccctatgagtgagaacatgcggtatttggttttttgtccttgtgatagtttgctgagaatgatggtttccagcttcatccatgtccctacaaaggacacgaactcatcattttttatggctgcatagtattccatggtgtatatgtgccacattttcttcatccagtctatcattgttggatatttgggttggttccaagtctttgctattgtgaagagtgccgcaataaacatacgtgtgcgtgtgtctttatagcagcatgatttataatcctttgggtatatacccagtaatgggatggctgggtcaaatggtatttctagctctagatcactgaggaatcgccacactgacttccacagtggttgaactagtttacagtcccaccaacagtgtaaaagtgttcctatttctccacatcctctccagcacctgttgtttcctgactttttaatgatcgccattctaactggtgtgagatggtatctcactgtggctttgatttgcatttctctgatggccagtgatgatgagcatttcttcatgtgttttttggctgcataaatgtcttcttttgagaaatgtctgttcatatccttcacccactttttgatggggttgtttgtttttttcttgtaaatttgtttgagttcattgtagattctggatattagccctttgtcagatgagtaggttgtgaaaattttctcccattctgcaggttacctgttcactctgatggtagtttcttttgctgtgcagaagctctttagtttaattagatcccatttgtcaattttggcttttgttgccattgcttttggtgttttagacatgaagtccttgcccgtgcctatgacctgaatggaaatgcctgggttttcttctagggtttttatggtttgaggtctaacatgtaagtctttaatccatcttgaattaatttttgtataaggtgtaaggaagggatccagtttcacctttctacatatggctagcctgttttcccagaaccatttattaaatagggaatcctttccccacttcttgtttttgtcaggtgtgtcaaagatcagatagttgtagatatgtgacattatttctgaggactctgttctgttgcattggtctatatctctgttttggtaccagtaccatgctgttttggttactgtagccttgtagtatagtttgaagtcaggtagcatgatgcctccagctttgctcttttggcttaggattgactttgcaatgcggggtcttttttggttccatgtgaactttaaagtagttttttccaattctgtgaagaaagtcattggtagcttgatggggatggcattgaatctataaattaccttgggcagtatggccattttcacgatattgattcttcctacccatgagcatggaatgttcttccatttgtttgtatcctcttttatttcattgagcagtggttttagttctccttgaagaggtccttcacatcccttgtaagttgggttcctaggtattttattccctttgaagcaattgtgaatgggagttcactcatgatttggctctctgtttgtctgttattggtgtataagaatgcttgtgatttttgtacattgattttgtatcctgagactttgctgaagttgcttatcagcttaaggagattttgggctgagacaatgggttttctagatatacaatcatgtcgtctgcaaacagggacaatttgacttcctcttttcctaattgaataccctttatttccttctcctgcctaattgccctggccagaacttccaacactatgttgaataggagtggtgagagagggcatccctgtcttgtgccagttttcaaagggaatgcttccagtttttgcccattcagtatgatattggctgtgggtttgtcatagatagctcttattattttgagatatgtcccatcaatacctaattattgagagttttcagcatgaagggttgttgaattttgtcaaaggccttttctgcatctattgagataatcatgtggtttttgtctttgggtctgtttatatgctggattacatttattgatttgcatatattgaaccagccttgcatcccagggatgaagcccacttgatcatggtggataagctttttgatgtgctgctggattcggtttgccagtattttactgaggacttttgcatcaatgttcatcaaggatattggtctaaaattctcttttttggttgtgtctctgcctggctttggtatcaggatgatgctggcctcataaaatgagttagggaggattccctctttttctattgattggaatagtttcaggaggaatggtaccagttcctccttgtacctctggtagaattgggctgtgaatccatctggtcctggactgtttttggttggtaagctattgattattgccacaatttcagatcctgttattgctctattcagagattcaacttcttcctggtttagtcttgggaaggtgtatgtgtccaggaatttatccatttcttctagattttctagtttatttgcgtagaggtgtttgtagtattctctgatggtagtttgtatttctgtgggatcagtggtgatatcacctttatcattttttattgcatctatttgattcttctctctttttttctttattagtcttgctaccggtctatcaattttgttgatccttttaaaaaaccagctcctggattcattaattttttgaagggttttttgtgtctctatttccttcagttctgctctgattttagttatttcttgccttctgctagcttttgaatgtgtttgctcttgcttttctagttcttttaattgtgatgttagggtgtcaattttggatctttcctgctttctcttgtgggcatttagtgttataaatttccctctacacactgctttgaatgtgtcccagagattgtggtatgttgtgtcttttttctcgttggtttcaaagaacatctttatttctgccttcattttgttatgtacccagtagtcattcaggagcaggttgttcagtttccatgtagttgagcggttttgagtgagtttcttaatcctgagttctagtttgattgcactgtggtctgagagacagtttgttataatttctgttcttttacatttgctgaggagagctttacttccaagtatgtggtcaattttggaataggtgtggtgtgatgctgaaaaaaatgtatattctgttgatttggggtggagagttctgtagatgtctattaggtccgcttggtgcagagctgagttcaaatcctgggtatccttgttaactttctgtctcattgatctgtctaatgttgacagtggggtgttaaagtctcccattattattgtgtgggagtctaagtctctttgtaggtcactcaggacttgctttatgaatctgggtgctcctgtattgggtgcatatatatttaggatagttagctcttcttgttgaattgatccctttaccattatgtaatggccttttttgtctcttacgatatttgttggtttaaagcctgttttatcagagactaggattgcaacacctgcctttttttgttttccattttcttggtagatcttcctccatccctttattttgagcttatgtgtgtctctgcacgtgagatgggtttcctgaatacagcacactgatgggtcttgactctttatccaatttgccagtctgtgtcttttaattggagcatttagcccatttacatttaaggttaatattgttatgtgtgaatttgatcctgtcgttatgatgttagctggttattttgctcattggttgatgcggtttcttcctagccttgatggtctttacaatttggcatgtttttgcagtggctggtactgactgttcctttccatgtttagcgcttccttcaggagctcttttagggcaggtctggtggtgacaaaatccctcagcatttgcttgtctgtaaaggattttatttctccttcacttatgaagcttagtttggctggatatgaaattctgggttgaaaattcttttctttaagaatgttgaatattggcccccactgtcttctggcttctagagtttctgccaagagatcagccgttagtctgatgggcttccctttgtgggtaacccgacctttctctctggctgcccttaacattttttccttcatttcaactttggtgaatctgacaattatgtgtcttggagttgctcttcttgaggagtatctttgtggcattctctgtatttcctgaatttgaatgttggcctgccttgctaggttgcagaagttctcctgggtaatatcctgaagagtgttttccagcttggttccattctccccatcactttcaggtacactaatcaaacgtagatttaatcttttcacatagttccatatttcttggaggctttgtttgtttctttttactctctttcctctaaacttctcttctcacttcatttcattaatttgatcttcattcacttatatactttcttccacttcatcaaatcggctactgaaggtattgcatgcatcatgtagttctcatgccatggttttcagctctatcaggtcatttaaggtcttctgtacattgttttctctacttagccattcgtctaatcttttttcaaggtttttagcttccttgtgatgggtttgaacatcccctttagctcagagatgtttgttattactgaccttctgaagcctgcttctgtcaacttgtcaaagtcattctccatccagctttgttccattgctggtgaggagctgcgatcctttggaggagaagaggtgctctggtttatagaattttcagcttttctgctctggtttctccccatctttgtggttttatctacctttggtctttgataatggtgacctagagatggggttttggtgtggatgtcctttttgttgatgttgatgctgttcctttctgtttgttagttttccttcgaacagtcaggttcctcagctgcaggtctgttggagtttgccggaggtccactccagaccctgtttgcctgggtatcaccagcggaggctgcagaatagcaaatattgcacaacagcaaatattgctgcctgatccttcctctggaagcttcgtctcaaaggggtgcctggctgtatgaggtgtcagttggcccctactgggaggtgtctcccagttaggctagatgggggttagggacccacttgagaaggcagcctgtccattcacagagctcaaacactatgctaggagagccactgctctcttcagtgctgtcagatggggatgtttaagtctgcagaaatttctgctgccttttattcagctatgccctgcccctacagatggagtctacagaggcaggcaggcctcattgagctgcggtgggctcctcccagttcgagcttccagaccactttgtttacctactgaagcctcagaaatggtgaacacccctcccccacccagtctgccgccttgcagttccatctcagactgctgtgctagcagtgagcgaggctccatgggcgtgggacccactgagccaggcacaggatataatctcctggtgtgccatttgctaagaccattggaaaagcacagtattaaggtgggagtgtcccaattttcccagtacagtctgtcacgggttccctcatctaggaaaggtaaatcccctaaccccttgtgcttcccggtgacgcaatgccccaccctgcttcagctagccctccatgggctgcatccactgtccaaccagcccaatgagatgaacaaggtacctcagttggaaatgcagaaatcacccatcttctgtgtggatcaggctgggagctgcagaccggagttgctcctattcggccatcttggaatggcaatctatgtttgctttttacatttgaaaaaactggtgtcacgtacctaggtattaatcattgtggtatcctcttgccgatttacctctttatcattaactagtgaccctccttgtcttttgttgttacagtctgtgattttagtctattttatctaatatgagaatagctactctggcacttttttggtttccagcttcatgaaatatccttttccatttccctgttttcatttccctttcggtgtctctatagatgaagttgatttctttaaggcaccataagttgggtcttatttctttatccatttgaccatttagagaatttagaacactgtcagtgttattattcataagtaaaaacttaagagtgggtgtagtggtgtacatctgtatttcctgcactttgagagactgaggcgagctgatctcctggggtcaggagtttgagaccggcctggtcaacatgatgaaaccctgtctctactaaaaatacaaaaattagccaagcatgctggcatgtgcctgtaatccaatttacttgggaggctgaggcaggagaagcttgaacctgggagacaaatgttgcagtgagctgagatcacacagagaagtcatctccactctcctcatcagaacctcttgttcacagcatttgtgagcacaaatcaatgatggttattctttcctactaattagggatattttattacacagcaatagcctccagcaaagggaaccatcatacatgattcctacaagttgacagggctggaattatcactgaaaaactaaggtggctatacttgattcccaatgtccaatttttcatgaatagagaaatttatcctttttccccccagccagaaaccaagttttgctcttacgcccaggctggaatcaagtggcacaatctcagctcactgcaacctctgccccccagcttcaagaaattcaccttttgaacaaggagatattaaggatacactatgtgtatgctaccggtggttgcaggagactcagaaaagagagaaacagtcactggcctcgtgcaactgatattctcgggaggagagaaaggcaatcaagaaagaaacatgctgtatttcagacagctgtaagtcctccacaagaaaagaaagcaggtgaggaacataggaaatgtgtcaaccataaggttcccgctaattctataagttggtcagggatatcctccaagaataagcagcatctgagcaatcacctgaagggaggaaggaaggaagactgtgagtggtggcttacacctgtaatcccagcactttgggaggccaaggagggcagattgcctgagctcaggagttcacgaccactcagagcaacctgttgatacccaatctctactaaaaacacacaaaaaaattacccgggtgtggtggcacgcacctgtagtcccagcttccatgcccagctgatttctctctctccatatatatatatatatacacatatattgtttttgcagagatagggtctcactgtgtcacccagtcatcaagcaattctcttatactgttttggaaaagcatgggaattacaggtgtgaaataccctgctggtcctgaaaaatgtgatatttgggattctctgcctggcttgttttacccaaaataatgacctccagttccttccaggttgctgcaaaagacatgattttcactgttttataactgaatagtattcctgtatgtatacataccacattttctttatttattcttctgttgattgacatgtagggtgattccatgtctttgctactgtaaataatgctgcagcaaatatttgtgtgcattttgatctattcctttgagtaggtacccagtactgcaactgcaggactgagtagttgttatattttttgttctttcagaaatctccatagtgtttgccataaaatctgcactaatttacattcccaacaacaatgcataagatttccccttttctccacattctcactaacatttgttatgtttttgtctttttcataatacccattctgactggagtaagatatctcattgtggtggttgttgatatttttgagacggggtctcactctgttgccagactggagtgcagtggtgtgatcgtggcttgctgcaacctccacctcccgggttcaagcaattctcctgcctcagcctcccgagtagctgggactacaggcgcgtgccaacaggcctggctcattttttgtatttttagtaaagacagggtttcaccatgttggccaggatgatcacagtctcttgagctcatcatacacctgcctcagcctcccaaagtgttggaattacagtcatgaggcagcgcacccaacctcaatgtggttttaatgaccatttctctgacgattcatggtgtggagaatttctttgaaataccttttggccatttatatgtgctcttttaaaaactgactcctgtccaggtgcggttgagcatgcctgtaaccccagaacttcgggaggctgaggccaatggatcacttgaggcaaagaggcagaaatcagcctggccaacaaggcaaaaccccatctttactaaaaatacaaaaaatcagccacgggctgtgactcgtgcctgtggtgcaagttactcaggaggttaaggcacaggaattgcttgaacccggtaggcacaggtcacagtgagccaagatcatggcactgcactacagcatgggtaatagagaaagacctgtctcataaaaacaaatgaataaataaataagataaaaaataaaaaagtctctttatgtcctttgccgactttttaatgggattctttggagttttctgttgtagttgagatctttgtttactctcggtattagtcttttgtcaaaggaaaagtttacaaataatttcttccgttctgcagtttgtctgctcactctgttgagaggattatttctttggctgtgcagcagctttttgtttcagtaaagcttttgaatttatataattaaaattttcagtttggtttaaatttgcactggtcgatttttggttttgttgcctgtacttttgaagtcatactcttgaactctttactagacaataaccagaagagttttctctagttttcttctcacatttttattatttcagtacatatatttaagtctataattcatcttcaattgatttttgtagaaatagtgagaaataggagtccaggtttattcttctgcaaatgacaattcaattgttccagcaccaattattgaaaagggtgtgctttcctcaacgtatattcttatcagctttgtcaaagatcagttggctataaatgtgtggctttctttctgggctctctagtctgttacatcaatctgtgtgtctatctgtatactactaccatgctgtattggtgatgatggctttgtaatataatttgaagtcaagaaatgtgatgctcccagctttgtttatttgcttcagaaaggctgagtcaacagctgcagagatgaagctgcccctcctcgcagggctccttcccggaaaaagatcatggctcccactgaccatataaccatggctggaactcctgaaattcccaaagggaggccctacccagtgaggggggatgaatgaaggtcctacttaaggaatctgtctggccacaatcaggcacagcagctgtgctgccttgtgggggaccagaccacctggattccctggagcctgcaggctagaatgtctgagtccatggaaacacagaaatggaggccgccctcacctccccagaaaactgtagtctcaggcagtctccagccgattgccactggttggctgctattccaagccagtgggtcttaacttgagaggtgctgtggaagtggggcccacggaatgaggctgcttggctccctggattcagccccttttctaagggaatgtacagatggaactcccgccttgcccagctttccaagtatataaaactcctgagtctctgtgagtgtctgagcgagtgctctggcaacattcgacacggctctgtgtatctgacccaagacccttatggcatgagctaatgggaggatcttctgatccatgcgtggcaaagatgcatgggagaaacatggtttgtgggtaggggttgtgcattcactactgcttctcttggctgtaggtgaaggtttctttggctctgtgctgatactgggtgcaccatcacccaccccctttgtttcttctcctgggtcaagtcatttgcctaatcagtcccaatgtaggaacctggatacttcagttcaaggtgctgaattcaccgtgcttttcattcaggggaagacagctgcttctcattgggcatcttggcctgcccacttcacgtcactttttgtaaaatccacaccactccaggaatatccattacttaacttcgcctgaaataaacagaaggctcattacacttatcatgggctcacttacttcgcctataatgaaggtgccatggaaatgctagtggatgacgtggtccattttcttagggatgagatagaaaaatggtgtatggctttttaatttaattaaaatttttagtttggtttaaatttacattggtctctttttggttttgttgcctgtacttttgaagtcttactcgtgaactctttactggacaatgaccagaagagttttccctaagtttcttctgatattttgaccatttcagtacatacatttcagtctataattcactttaaattgatttttgtaaacatggtaagaaataggagttcagatttattcttccgcatatgataatgcaactgtcccagtaccaattattgaaaagggtgtgctttccctagtgtatattcttgtcagctttgtcaaagatcagttgcctatgaatgtgtggctttcattttggattctctcgtctgttacatcaatctgtgtgtccacatttatacctgtaccatgctgtattggtgactatggctgtgtaatatattttagagttaggaaatgtgatgctcccagctttgttcatttgcttcagctgaaaaggttgagtccacaattacaaagatggcagccgcccatccccggaggacctccaacccagaaagagatcaggcttcccaccaaccctataaccctggctggagttcctgaaattccaacagggaggaccttcccagtgaggagggatgaatcaaggtcaaatttaaagaaacagtctggccactatcaggcacagcagcagtgctgccttgtgggggacccctcctgctccagaccagctgccctccctggagcccgaaggctagattgtctgagtctacggaaacagagacggtggccgccccaaccacccagaactcggtagtctcaggcacttggcttgctatcttgccactgcttggctggtattccaagcccgtgggacttgagaagtgctgtgatgatggggaccacaggatgaggctgtctggctccctgtgatatggctgtgatgagtggaggaacaccagggctcatgtctcacacagaattggagaaaatgacacaaacacatgtacagtggttttatggcgtgcagtttaataggcaagaacgaaggaagagctccccatactgagacagagggaggggggctccaaagccaaaagaggaaacccggagtgctgtggataccaatgagttatatgaagaaactggagggggcggtgtctgatttgcatagggttcaggcgattggttcgaccaggcatgtcatttatgtggcccacggaaaaactggccctcccacctagcctttgaatatgcacgtgccggacaccctgatttcctacactcatggggatatatgggggtggccatatcgccaggcacaggtggggacaagggccagaagagggcgggaatcgctatgtttgggtggacccagtttctaatggccggcatctgcagatcaaggttaccggagaactctaaaagccggggctttcctgctagacaagactcatttctggagctgctttaaaaagaaacaaaacttcccaaggaccccttttcctccctgtctgcccaaaataatttcttaacaactcgtataacacctgaattcagcccccttactgggggaatgtaccaacggaactcccacctttcctggtttctcaaggctagattgtgtaaacctcctgggtctcggtctgtgtctgagcagctgctctgccaacactccacacagccctgtgtactaggcccaaggccgccgtgactcagcccatgggaggatctcctgatttcttggttgcaaagatccatgggagaaaaatggtttctggggcggggtcacacactcatggcttctcttggctgtgcaagaaggttcctttggctctgttccaatatagcgtggttcatcacccacccctgttttctttgttctcctgagtcaagttgtttgcctagtcagtcccaatgtgagaacctgaatatttcagttcacgtgcttatcgtgaaattcactgagactttaattcagtggaaggcagcctcttctaattggccatcttggcccgccccctccacgtcacctcccataaaatggccacgctctccagggacgatgccattatatatctttacgtgaaaccgacagaacacttattacactttttgtgagctcatttacttcacttataatgaacatggccatggaaatgctagtggagaaagtggtcgattttctgatggatgtgataaaaaaatggtttgccgaccaattaatgacatatgtctcaaaactagtaacgagacccttaatcgctgggttgaagtttctaatcaagaagatgctcatctatgtattcaacaaagcagcttcccttgcttctgaaatgcttccaaacaacatctcatatttcctgaagaagataatgcctggacaagcagcacaagtcattcaggtttactttcagctcataaatccagcaggatattcgcacaattgttgggaaaccttatcagttcatgagtcgtgcatgtttcctttaatttcaggaggaagagggtaatctggaagagtttcctgacctactctgctgctgtgattaaacaaccaccaggaaattttgatgacactgttctcctgagctcctccctttcctcggggaagaaaagcattgaaactacaaaaataaagtgttatttggctggagtgaggtctcatgtctgcttatgcggtggctcgctgctcagaacagggtgagtctctgagttgtacgctgaggaggggaggctgtcaatctagaaaaaacccattgcatgggacacctccatggggtctggggggctgaggatgaggagctggactggatctagggaaggaggaggtttcagagggtgaaattctggcagtaaatcctgggggtgtttgaaaacttcctccctcagaaggagaagactcagggaggaataaggacaaaccatgggtcccttgaggggcatttactaacttaagaggactttatcgggaagcagagtgacaatggcctccttgaggactgaggcccctggataaatgaggcccagatccagatccagtccatgggagatgagaccttcaagggacatatttttgttgggacagaggaaaagtgcagctctgcagctgcagaggaagccttggcagtgtgaaagcgaccttggagggggccctgtgcgttctgaatgcttctgaggtccatcccctgtccccgcctctttttctggattttttgggctccatggtctccgccatcttctgagcgctccacgctgccaccttcagttttctcttctgggctccaaatactccaaaatctttcatatctgtgcccctacccctgtttttagcatgtgttgggactccaggtccctgaaggtttctggcctgaaatccacctccccagcggtgtggattctgctctagagaccccgcacttggcaaggttcccaggcccctgggggacaaccgagtggtatgtgcacttcagggctccacactcggcaaggtctttcaagcccttggggttccctcctcagttttcttcacatgtctgggatgtagtcactctataaatgccgggatgtgatccccaccccagtgattttttttagttccatgagtgttgctatctgaatagtcatcctgagagtgatgggaccttttgaatttgcagcaagttttagattagtgtgagtggcctgagatcgcaaaactggggctagcattggatgtgaggttaggctggtggaaaaatttgcccagaacctgaggagtgtgggctcactgcaggtggttaggatcagcacagaattgcaaggatgtatagctttggggtaaagaataacatggttcagaagtacatgtattagtcttttcatgcattgctataaagaattacctgagactgggtaattaattataaaaactcaggtttaattggctcatggttccacaggctgtacaaaaaggatgatgctggccatcagctcaacttctggggaggcgtcagaaaacttagagtcatggcaaaaagcacaagggaatcaggctcatcctccatggccagagctggagctagtggtaggagaggtgctgcacacttttgaacaatcagatctttttagaactctatcaccagacagcacctagaggatggtgctaaattattcatgaaatatccacccatatgatccactcaattctcaccggcccaaccaggaccacctccaccattggggattacaattacacatgagatgtgggtggggacacagatccaaactcgatcagtgggcatcttggactgggtctactatagaagaagaaccaggagctgactatcatccttaagactgcccatgatggccaggcagggtggctcatgcctgtaatcccagcactttgggaagccaaggtgggtgaatcccctgaggtcaggagtttgagaccagcctcgccaacatggtgaaaccctgcctctactaaaaacacaaaaaattagatgggtgttgtgccagacgcctgtaatcacagctactccagaggctgaggcatgagaattgcttgaacctgggaggcggaggtggcggtgagccccaatcgcactgctacactccagcatgggcaacaataccaaaacatcgtctcaaaaaaaaaaaaaaaaaaaaaaaaggctgcccatgaccactgccccagtgagagggacaccagcatggctaagatcaagtgctggacattcttcatgggtcagacattaaagcaggccacactgttacagagatgggctccattcatagcaacaaagtggtgagaagatgtgggaatggcagaggccagcactttgccatcaatgcaaggtgggcataaggagctggcaccagtgccagagtgcatcaggggaggactgctttgcaatatctagcacttacctcttagagtatgtttcattagggacaacagatataaatggcagacaagtgagtcccttcagtaacaggaaatagaaatcatcaagaggaacagaaacagatgtcagcagccctcatataaagtcatcatccttcatccagttaaaacctgagacagttctcacataagaaggtctaattcaaaaagagactgggttctcatgaggcaggttcatgcaaaaccaagggaagtatacaactttgggattctccagcttcccttggaaaagacctacaatcatttgcttaggtaactgagcactgaacaaaggtgagtattgttatctttcagaagctgttggccatgaaggtcttgctggcataaaacccatggttggaaacatcaccatgacccctgttagagtaatggcctaagggcaagggtcaggaaattgatgtattccttgccaacttctgcgagacgagtgttggtccactcatctctttcacggaattcaccagtctggtatcttcaaaatccagaaggatgatggcagatggcaggaaactaatgcaaacaccatcagttgtacctccactgtagcagcagtaatggatgttatctcttcattgtaatatccagggagggagaagatgacattattctcaatattctaaacaccctgtgtgtacagcctctgtgatattttttgtaatatccgtgtgggagagaattatattactcctaatatctcaggggttgtgccccctctgtgacaatgttcctaacacccaggaggggataggatgatatcacttttagcatcacagggggtgtacaccccactgtaatattgttcataatatccgggggggagagaatgatattactcccaatatcgcaaagactgtacaccaacctgtgatattatttgtaatatccataagaggaagaataatattactcccaatgtcacaggaagtgtacacccttctgtgatattgttcaaaagatccagttagggaggggatgatattactctcaatatcttaaacaccctgtaggtaagccctctgtgatattcctcataatatccagagggagaggatgatattactcccaatattgcatgaagtctacaccccacctgtgatattgttcctaatatccaggatgggagaggatgatattactcccaatgtcgcaggggatgtacaccttccctgtaatattgttcgtaatatctagaaaaggagaggataatattactttcaacatcgcagggggtgtacaccttccttgttatattgttgctaatatccagggaaaaagaagatgacattaccaccactattgcagaaggtgtacacccccccttgatatagttcctaatatccagaaaaggagaggagatattactccaaatattgcaagaggtgtacattcccctgtaatatttttcctaacattcaggaagaaagagagtgatattgcccttaatattgaagggagtgtgccccccccgtgatattgtttctaatatccaagaaatgaaaggatgatattactcccaatatcacaggggctgtacagccccctcccatgatattgttcccaacatcggggggggggtgaaatagtattattcccagtatcacaataggtgtacacacctgtcgtgatattgttcctaatacccatgggggaaaggacgatattattcttaatatctcagagggatgtacaccctccctgtgatattgttcctaatatccggggtgggagaggatgatattacccccaaaatctcaaagggtgtacacccctcttgtgatattgttcctaatatccagggtggagaggataatattattcccaatatccaggaaaggaaacgatgatgttactgtgaatattccagggggtgtcctcccctctgtgatattgttcctaatatccaggttggggagattatgatatttctccaaatatcacaaggggtgtacaccaaccctgtgttattgttcctaatatcgatggggggagaggacgatattactcccaatatcacagggggtgtacaccacctttatgatattgttcctaatatccatgaagaaagaggatgatattactttcaatatcgcaggggatgtacactccccctgtgatattgttagtaatacctaggagaagaaagtgtgatattactcccaatatcgcaggggatgtacacgcttcctgtgatattgttcctaatatttagggggaaaggggatgatattactcccaatatcgaatggtgtgtacacccccccgtgattctttttttttttttttttttttttttgagatggagtcttgctctgccgcccagactggcgtgcaatggcgcaatctcggctcactgcaacatttgcctcccaggttcgcacgattctcctgcctcagccttcggagtagctgggattataggcagctgtcaccataccaggctaatttttgtatttttagtagagttggggtttcaccatgttggtcaggctggtcttgaattcctgacctcaaataatccacccaccttggcctcccaaagtcctgggattacaggcataactttccctgtgatattcttcctaatattcaggaagaaagaggatgatattgctcccaatatcgcagagagtgtgcactcctcctgtgatatggttcttaatattcagaggaggagaggatgatattactttctatattgcagaaggtgtacacctccctcgtgatgtctttcctaatatccagtgggggagaggttattagtctcaaaatcacagaaggtgtaaacccccatttgatattgttcctaatattcaggggtggggagagaaaggtattactcctagtatttcagggcatgaacacccccaccgtgatatcattcctaatatccagaaggggaggcaatgatatttctcctaatatcacaaagggtgtacaccccttctgtgatattgtaaatattctgtgtgtacacccccctgtgttatagtctgtaatatccgggtgggggagagggtgatatttctccccatattgtaggggatgtacacccttctgtgatatggttcgttatatccagggaagaaaaaggtaatattgctgcccatattgtggagagtgtacacccccatgtaatatggttcgtaatatccaggagtggagagggtgatactgctccttacatcgaggaaggtgtacaccttattgttatatgattcgcaatatccaggggaggagagagtgatattgctccccatgtcgcagggggtgtaaaccctccgtgatatgattggtaatatccaggaaaggaaagggtgatatttctccccatatcgcgggggacgtacatcctcctgtgatatggttcgtaatatccaggaggaaagaggaaaatattgctcttcataacccgaggggtgtacaacccctgtgatatggttcgtaatacccagaagtgtacacccctctgtgatatggtttgtaatatccagggggttagagggtgatattgctccccatatcgcagtgggggtacacccccctggattggttcataatattcatggggggagaaatttacatttatcctcatatcagggggggtgtacaccccccgtgatatggttcgtaatatccaggggaagaaagggtgatattgctccttatatcgcggaaggatcaccctcccctgtgatatggttcataatacccagacgggaagagggtgatattgttcttcataaagcgaagggtgtacagccccctgtgatatggttcataatatgcaaaaggggagagggtgatattgctccccatatcacggagggtgtactcccttctttgatatggttcgtaatatccaggggtgtagatggtgatatagctcgccctattggggagggtgttcacccctctgtgatattgttcgtaatgtccagggaaagagaggatgatattactcccaatatcgcagaaggtttacaccactctgtgatattgttcataatatccagggaaggagaagacgatattactcccaatatggcagggggtgtagaactcctgtgatattgtttgtaatatccaggcaaggagaggatattactctcaatatcgcagaaggtttacacccctatgtgatactgttcatgatatccagggaaaaagaggatattactccctatatcacaaagggtgtacacccctttgtgatattttttgtaatatccaggggagagaggataatattactctcaatatcagaaggggtgaaaaccctcctgtgtcattgttcataatatttagggaaggagagagtgatattactccaaatatcacagtgggtgtacacccccctatgatattgttcctaatttccagaaggggagatatgatattattgccaatatcgcagaaggtgtacaccttactctgacattgtttgtaatatccagatggggaaatgatgatattactcctaatatcacagggggtgtacacccccttgttttattgtttgtaatattcaggggaagagacgattatattactcccaatatcgcagggtgtgtacaacactctatgatattgttcataatatccaggggaggagaggaagtgtacacccccccgtgatattgttcgtaatatccagaggtagagaggatgatattactcccaatattgcaggtggtgtacacctttctgtgatattgtcatgatattaagaaggggagaggatgatattactaacaatatcacaaaaactgtacactccctgtgatattgttcataatatccagaagaagggaggatgatattattctgaatctcgcagaagatatacaccaccctgtgatatggttcataatatcctaggggaaagaggatgacataactgtcaatatcgcagggggtgtacaattccctgtgatattgttcacaatattcagagggaaaaaggataatattactttcaatatcgcaggcggtgtacacattactgtgttattgtttataatatccggaatgagagaaaattttctcccaatatcacaggaggtgtacactcccctgtgatattgttcgtaatatccagggaggggagaggatactattactcccaacatctcagggagtgtaggccccccctttgatattgttcctaatattcggaagtggagaagatgatattacttccaaaatcgcagggggtgtacactccctctgtaatattgtttctaatattcatgagtggaaagaaagatattactcccagtattgcaggggacatacaccacactgtgatcttgttcacaatattcgggggggagaggatgatattactcccaatatcaaagtaggtgtacacccccttctgatattgatcgtaatatccagaattaaagatgataacgttactcccaatattgcagggggtgtacatttttgaatactgttcataatattaagagggggaggggatgatatctgtcccaatatcgcaaagtgtgtacacctcctgtgacattgtcccaaatatccagaggaaaaaaggatgttattactcttaatatctcagagagtgtacacctccctgtgatattgtttgtaacatccagaagaaagaggctgatattactcttaatatcgcagggggtgtacacccccgccccgggatattattcgtaatatccagggggaagtggaatgttcagaatgggagaggatgatattacttgcaatatcatagtgggtgtacaccccactgtgatattgtttgtaatatccgggaaaggagaaaatgacattcctccccatatggcaggggctgtacaccacctatcatattgttcaaaatatccagaaggggagaggatatgtctccaagtatcacagggggtgtacaccccgctgtaatattcttcctaatatccagggtgtgagaggataatagtactcccaatatcccagggcatgtacaccccccttgtgatgttgttcctaaaattcatggggagaaagaatattactcccaatatcacagggggtgtacatacactctgtaatattgttgccaatatgcagcaggagagaggatgatattactcccaatatcacaggggctgtacaccccgctgggatattgtttctaatatcaagggggaaaaaggatgatattactcccaatgtcgcagggtgtgtacttcctctttgtgacattgttcctaatatccaggagagaagagggtgacattccttccaaaactgaaaggggtgtacacaccctttgagatattgtctttaatatccagaacgaaacaggatgatataactcctaatactgcaggggggtacaccctctctgtgatactgtttctaatatccaggaggggaaagaaaaatattaatcccaatatcacagggggtgtacattccccctttaatattgttcctaatatccaggaagacacaggatgatactatttccagcagcacagggcatgtacacccctttgtgatattgttcctaatatccaggaaaagagaggatgatattactgtcaatattgcagggcgtatacactggttctgtgatattgtttctaatatccgggggtggagaaaatgatattactcccaatattccagcgggtgtacacccgttctatgatattgttcctaatatctgggggagagagaatgatattattgtcaatatcacaggggatgtacagattccctgtgatattgtttctaatattcacagggggagaagggtataatactcccgatatcgcagggggtgtacactccccctgtgaagttgttcctaatatccagggattgagagaatgatattactcccaatatcacaggcggtgtaaaccccctgtgtgatattgttcctaacatccagaggaaaagatgatgatattattttcaatatcacagggggtgtacgcatccctgtgatattgtttctaatatccaggggaggagaggatgatattattgttaatatcgcagggggtgtaccccaccctgtgatactgttcctaatatccggggtggaagaggataatattgctcccaatatcgcaaagggtgtacaaccttcctgagatattggtcctaatatccagggagggagaggatgatattactttcaatatcacagggagtttacacaacccctgcgatattgttcctaatatccagcggaagaagagttaggataatactattttcaaaattgctgggtctgtaccccctccccgtgatattgtttctaatatccaggaggggagaaagtaatatgactcccaatatcttagaagatgtacaccctccccataatattatttcttacatccagggggtagaggatgattttgctttcaatatcacagagggagtaaacctttccggtgatattgtttttaatatttaaaaagagagaagataaaattactcccaatacaaaggggatgtattgtgtactcccccctctgatattcttttttaatatccagatggagagaggatgatattactttcaatattgcatgggatgtataaatcccctgtgttattgttctgaatatacaggtggggagagtatgatattactccaaatatcgcagggggttctttccccctgtgatattgttcctaacattcagggagggagaggatgatattactcttaatattgcagggggtgtacccacgcctatgatattgttcctaatatccagagggggagaggatgatctaactcagaatatgacaaggggtgtacacacagcctgtgatatggttcctaatatacaggggagaaggggataatatttctcccaatatcgcagggggtgtacaaccccctgtgatactgttcctaatatacagaaggggacagcatgatattgttcctaatatcgcaggaggtgtacaacgccctgtgatattgttcctaatatccagggcgggagaggatgatattaccctcaatatcgcagggggtgtgcactttccctgttatattgttcctatgatccgggtggggggaaatgacattagtcccaatatcgcaggatgtgtgcaccgctcccccgtgatattgttcctaatatcaagggggagagaggaggatattactcccaatatcgcaagggatgtacatcctccatgcgatattgttcgtaatattcaggaggagagaggatgatattactcttaatatcgcagaaagtggacacccaccctgtgatgttcttcataatatccagggaagcagacgattatatgactttcaatatcgctgggagtgtacatcccttttgggatattgtttctaatatccaggaagggagaggattatattactctcagtattgcaggcagtgtacaccttttttgtgatattgttcctaatattcagaaagggaaaggatgatattactcccaatattgcaggtggtgtatatccccctctgatattgttccttatatcaaggaagagaaagaataatattactcccaatatcaaagacagtgtagacccctcctgtgatattgtatttaatatccatggggaaagaggatgatgttactcccaatatcgcagggggtttacacccacactgtgatattattcctaaaatccagtggaggagaaaataatattgctcccaatattgcagggtgtatacaggccctcccccgttatattgctcctaatatccagcggtggagaggatattactttcaatttgtgtagggagtgtatacccccctgtgatatttttctaatatcaaggatgggaaaggatgacattactcccaatatcgcaggaggtgtacacgccctgtgatattgttcctaatatctagggaaggagaggatgatattactttcaatattgcaggagctgtacaccctctgtggtattgttcttaatatttaggttgggagaaaatgatatgagtccaaatatcgcagaaggcatacacacttccaataacattgttcttaatatccgggggagagggtgatattactcccaaaatctctggggggtgtacacccccttctgatatttttcctaatatccagggaaggaaacgatgatattactataaatattccaaggagtgtacaccttcctaatatcctaatattgttcctaatatccaggggtgggagaggattatattactcccgatatcgcagtgggtgtacacccctcctgtgatattgtttctaatatccaagctaggagaaaatgatatcactctcaataccacagggggtgtacaccttccgcatcatattgttcctaatattcagagggaaagaagatgaagttactttcaatatcggaggggttgtacacaacccctgtgatattgctgctagtatccaggaagaaaggggattatgttactccccttatagcagggggtatacacctcccctgtaatattgttcctaatatcaaggctgggatatacgtggggggaaggatgatattactcccaatatcgcaggggttatacaaccttctgtgatattgctcctagtaaccagggcagaagaagatgatattactcctaatatcgcaggaggtgtacactcccccattatgttgttcccaatatgcagaaaaggagaggatgacattattgccagtatcgcagggtgtgtacaccacccctgtaatattgttccaaatatttagggggagagaggatgatattactcccaacatcgcagggggtgtacacacatcccctgtaatatagttcttaaaatctaggggaaaaggggatcttatttctctaaatattgcagagggtgtacactccccggtgatattgttcctaatagccgggagggagataattaaattactttcaatatctcagagagtgtacatcgcccttgcgatattgttcctaatatccagagcaaaagagaatgatattactcccaatatcttaggagtgtacatttaacctgtaatattgttcctaatatccagggggaagagaatagtattactgccaatatcgtaggggttgtacaccttttctgtgatattgttgcaaatatttagtagagggaaagaatattactcgcaatatcacagggaatgtatacttcccctgtgatattgttctgatatccagaaaaagagagggtaatattactcccaatattgcagggggtgtacaccccccttgtgatattgatcctaatataaaggaaggaagaggatattactcctcatatagaaggggttgtccaccccccttgtgatattattcctaatattcagggaagcagaggatgatattattttcaatatcacagagggtgtgcagtccacctgtgatattgttcttaatattcggggggagaggatgttattatgcctgatatcgcagtagaggtacacccctcaagtgatactgttcctaataaccaggggtgaagaggatgatattactcccaatatcgcaggtggtgtacacccccccatgatggtttctaatatacagagggggagaggaaaatattactcccaaaatcgctggaggtctacaccccccttgtgatattgttcctaatatccaggaaaggaaacgatgatattactgtgaatattccagggggtgtacacccgctttgtaatattgttcctcatatccagggtgtggagaggattatattactcccagtatcgcagggggtgcacgacgcccctgtgatattgtttttcatatccaggaggggagattattatcaatatggcaaggggtgaacaccccctgtgatattgtacttaatagttaggttggcagaaaatgatattagtctcgatatcgcagggggtgtgcactccgcctggtgatattgcttttaatatcaagggggagaaaatggcattactcccaatatcgcagggggtgtacaccgctcatgtgatattgttcctaatatccaggtggagagaacataatattactcccaatatcgcacaaggtgtacacccctcctgtgatatggttcctaatatccatgggaggagatgatgatattactcccaatatcacaggggatgtacaccacccttgtgatattgttcctaatatccagggaagaaaacgatgatattattgtgaatattacagggagtgtacacactccctgtgatattgtttttgatatacagggtgggagaggatgatattactcccaatatcacataaggtgtacaccccccgtgatattgttctaaatatttcggtggggagaaaatgatattagtctccatatcacagggggtgtgtgctcctcaggtgatattgtttttaatatcaagagggggaggagattatattactttcattatcacagggggtgtacacccctcctgtgatattgttccttatatccaggcgaggggaaaataatattactctcaatatcgcaggaggtgtacacaccccatgtgatattgttcctaatattaagggggaaagaagataatattactttcaatatcacagggtttgtactcctttcttgtgatatagtttttagtatccagggggaaagagcatgatattactcccattgtagcaaggggtgtacacacctcctgtgatattgttcctaatatccagaagtggtgaggatgatattactcccaatatcgcagggggtatacaccccacctatgatattatttctaatatccatgggaaaagagtatgatattacacccaatgtcgcagagggtgtgtatttttcctgtgatattgtttctaatattcaggcggggagaagatgatattactctcaatatagcagaaattgtacatccccgctgtgatattcttcataataatcagggaaaaagaggatgatattactaccaatattgcaggggggttacacttcccctatggtagtgttcctaatatccaggaagaaagaggatgatattaatcccattatccaggaagtgtacacccaccctgtcatgttgttcctaatatccagcagggaagaggatgatattacaccccccccccgtgatattctccttaatatccaggaggggagaggctgatattactggatatatagcaggggtgttcataccttctgtgatattgttcctaatatccagaaaaggagaggatgatattacttccaatatcgcagaaggtgtacacctccctgtgatattgatcctgacattcagaaggggagaggatgatattactcaaaataccgcagggcatgtgcattcccttgtgatattgttcctaatacccagaagggaacaggataatattactttcaatatcgcagggagtgcacacccccctttggtatggttcttaatatccagaaggaaagagggtgctattactttccatattgcaaggggtgtacaccccactgtggtatggttcataatatccaggcagggagagggtgctattactccccacagtgcggggcatgtacaccctgctgcggtacggttcctaatatccagggggagagaggatgctatgactccctatatcgcggggtgtgtacacccctgtgtggtatgttttgtattctccaggaacggagagggtgttgttacccctcatatcgctggaaatgtacactcccctgtggtatggttcgtaatatccaggggattgagggtactgttacccccatactccccatatcgtggggggagtgcacctccctgtggtatggttcgaaatatccagggtaagagagggtgctattattccccattttgcaggaggcgtacacccccctatggtatggttcgtaatatccggggtgaggggatgctatcaaaagaagagagaaagagaccccccatattgttctatattattttatactcagtacctgttttaagaagaaacaaggaagtgaaaccaaaagcaggcagcccggcgccaggcaccagacccaaaaccagacccgaaaccaggcctgggcctgcctgaccttagcctgatagttaaaattcaacccatgacctagcaaccaatgttatccatagattccagacattgtatggaaggacattgtgaaatttcttgttctgtgctgtttcactctgattaccggtgcctgcagcccctgtcacatacccactagattgctcaatcaatcatggccctttcatgtaagatctttagtgttgtgagcccttaaaaaggacagaaattgtgcactcaacaagctcggattttgagacgctagtctttcgatgcttccagctgattaaaagccacttccttcactacctcggtgtctgtggggttttgtccgcgactcctcctgctacactatgactccccatatcaaggggggtgtacacccccctgtggttcgtaatatccagcaggggaaaaggtgctattactccccatattgcagggagtgtacacccccttgtagtatggatcgtaaaatcaaggggggagggaaggtgtaattatccccatatctcagggggtgtacacccctttgtggtaaagtttgtaatatccagggatattacagggatattatccccaaattaatacttttataatttcttatgcctgcctttactgcaatctctgaacataaattgtgaagatttcatggacatttatcacttccccaatcaatacttttataatttcctatgcctgtctttactttaatctcttaatctcatcatctttgtgagctgaggatgtatgtcgcctcaggaccctgtgatgattgcattaactccacaaattgtttataaaacatgtgtatttgaacaatatgaaatctgggcaccctgaaaaagaacaggataagagcgatgttcagcgaacaagggagataagcataaggtctgactgcctgtggggctgggcagaacagagtcacatttttcttattgcagaaaatgagtaggagaaatatcactgggaagggaacgcattcctaggggaggcctatggacggccgctctgggggtgtatcccttatgtggttgaagataagggatgaaatacaccctggtcccctgcagtgccctcaggcttgctaggattagaaattccagcctggcgaattctagtcagaccagttctctgctcttgaaccccgtttcctgttaagatgtttatcaatgacaatgcgtgcacagcaggacatggaacctcaatagtaattccattttctccctggccttgtgaccttgctaggcccttctgcccttgtgatcttttattgccatttgaagcatgtgatctctgtgacccactccctattcgtatccccctccccttttgaagtccctaataaaaacttgctggttttgcagatcaggtggtcatcacagaacctgccgatatgtgatgtcaccccggaggctcagctgtaaaatttctctttcgtactctttcactttatttctcagaccaggtgacacttaaggaaaatagaaaagaacctactttgaaatattgggggctagttcccccaatagacattgttcctaatatccagaaaaaaagaagatgatattactcccaatatcacaggggttgtgaaccccacctgtgatatggttcctaatatccaggaagggagagaatgatattactctccatattgcagggggtgtgcacatccctgtgatattgttcctaatatccaggggaggagagggtgatattactcccaatattgcaagggttgtaaactccaccctgtaatattgctcctaatatttaggatttagggggggagaggataatattactcccaatatcgcaggggatgtatatgccctctttgatattgttcctaatatccagggggggagaggataatattactttccatatcacaaagagtgttcacccccctgtgatattgttcctaatatccaaaaaggaagaggatgatatcaatcccaatatcacaggaagtgtacaccccccccttttatattgtttctaatatccaggggaaatgagggtgatatttctctcaatatagcagaatgggtacactccccctgggatattattcctaatatccaggggaaaaaaagaggttgatattcttcccagtatagcagggaatgaatacaccctttgtgatattgcttctaatatcaaggggaaaagaggatgatatgactcccaatatcacaggggatgtaaacctgtggcgttgttgctaatatcaaggagggaagagtatgatattactcctaatgtcgccgaaggtgcacactttccctgtgatattgttcctaatatccaaaagggaagagaatgatattacccccagtattgcagggtgtacaccacccctgtgatattgctcctaatacccaggaaaaaagagaatgctattacccccaatatctaaggggacgtataccttccctgtgatattgtttctaatatccaagtggggagaggatggttttactctcaatattgcagggagtgtacactccccctgtgatactgtttctaatactcgggctgggagaaatagtattactcccaatatcgcagtgatattgtttccctgtgatattgtttctaatatctagtgggggagataattatattactaccccatacacaggggagggtgtacattcccctgtgatattgtttgtaatatccagggaaggagaggatgttactcccaatatcacaggggttgtacaccccttttttgatattgttcctaatatctggggggcagagaattatattactgtcaatatcacagagtgtgtacaccccctctgttatattactctttatattcagggcggtagaggatgatattactccctatatcacagggggtgttcacccctcctgtgatattgtttataatatctaaggggaaagaggatgatatcactctcaatatcaaaggaaatgtacacctttcctgtgatattgtttttattatataggggggcagaggatgatattaagaacaataccacaggggatgtacacccacgtattgatattgtccctaatatgtatggggaaagaggacagtgtaactcccgatatcgcagagtgtgtacacccccttgtgatattgtttctgatatacacggggagaaaagataatatttcttccaaaattgcagggggtgtacaaccccctgtgatattgtttttaatatccagtgggggagagaatattactcccaatattgcagggcgtgtacacaacccctgtgatattgttcctaatatccagagtaggggaggatgacattactttcaatatcgcaaggggtgtacattcccctgtgatattgctcctaatatccatgaggggagaggatgatattattcctaatatggcaggggctgtacaccttccctgtgatattgtttctaacatccagtgggggagaaaatgatattactccctatatcacagaaggtgtacactttccctgtgatattgttcctaatatccagaaggggagaggataatattactcccaatatcgcaggaagcttacaactcccctgtgatattgtttctaatatccagggaggtagggatgatattactcccaatatcgcaggggatgtacactcccccgtgacattgtttctaataaccagggggtgagaggatgatattacgcttaataccgaagggggtgtacacacccttgtgatattgtgcctaatagccagggggaagaaaattatattaattttaatatttatggggaaaaaggatgatattactcccaatatcacaggggctgtacaccgaccttttgatattgtttttaatatccagaagagaagaggataatattgctcccaatatcagaaaaggtgtaaaccccttctgtgatattggtcctaatatccagggagggagagaataatattactaccaatatcacagaaggtgcccacccccaaggtgatattgctcctaatatccaaagataatagggtgatgttactcccaatatcacaggaggtgttcacaccccttgtgatattgtttctaacgtacagggaagggagaggatgatattattcccaatatcacaggaggtgtatactcctctgtgatattgattttaatattcggggggaaaggatgatattactccctatatcgcagagggtgtacaccctctgtaatattgatcctaatatccagggcgggataggatgatattactcccaatatcgcagaaagtctacacaacccccagtaatattgtttttactatccagggggaagaggatgacattactcccaatttcacagagtgtgtacactcaccatttgatattgtttctaatatctagggggagagaatatattactcccaatatcacaggaattgtacaccacctctgtgacattcttgtgaatatccggggaaaaagagaataatattactcccaatattgcagagcgtgtacacccctccatgatatcgatactaatatttttttaaagaggatgatattactcccattgtcacaggatgtgtacaccccccttgtgaaattgttcataatattctggggggagagcataatattactccccatatcgaaaaaggtgtccaccctccttataatatggttcctaatatccaggatattacttaatccaggatacttgtaataccctaaatatacaattgcttgaacctccacctcccaggttcaagcaattcttctgcctcagcctcccgagtagctgggactacaggggcacaccaccacacccagctaatttttttttcttgtatttttagtagagatggggttttgccatattggccaggctggtctcaaactcctgaccttgtgatctgcccacctcagcctcccaaagtgctgggattataggcgtgacccaccgtgccaagccaggaagaggatgctctatagatttccccaataagagatggctttgcagggccattccaaaatatgtcaaagaaatacatttggggataaaatactttgatttcctttagggaatgttatctattatgtgatgctataccagagtcaggttggagtcggttatcttattgcaacaaagagtctgttccgtcactgttgggatctctattttttcctcttatttcttgagacagggtctcactctgtcacccagtctggagtgcagtggtgcgatcttcattcactgaaacctctgcctcctgtgttcaggtgattctcgtgcctcagccccttaagtaactaggattacaggtgtgcgccaccacacccagctaatttttgtattttcagtagagatggtattttgccctgttggccaggctggtcttgaactcctggcctcgtgtcatctgcccacctcgacctcccaaagtgctgggactgcaaatgtgagctattgtgcccagccaggatctctgttttaatgttagtgctggtcactttgcatgaactccaaagggaagaaatataatgaggtgtgtctgaccccctgccttctcatcgtgacctgaattagtttttcaggtttgcaggggatacccttggacaagaaggggctctattcggttggttggggggattagaattttactttttgtttacaatatttctcctgaaagagttaggggctcacaaggaatttccgcgtgagcaacttatgaggaaagccatctgggaagatatgtgtccttgtgtcactgggatattctcgtttaccccaatgatacggcaatgacgcagggttgtgaaattacagctatgtgtttggggaaaaaagaaagcaggattgtgtgactacgtttccaaacttcacttgcccttagccatagtgagttgggggcctggagattctgttttctttcacaatgatatagatacaattaaatgtatagaaagcaaaaaaataaaaaggtgagtaatgaggaacctctgattcctgagtggccatgtagttacccatggcacagagccacagttactgaaggtaaagtttgctggggaatttagaaatgaatccagctcttggaggagtcagtttactggatgcctaagaaaatgcaaacaaaataagaaaaaagggtaatattcaatcccatagttattgttacctgtcatagctaaagtaaaattaaaacagagtgctggcttcaatcttgatgctacactaagcttagatttcagtgaatgtgagtctcagccactagctcagagccacctcccaaagaccaaatcatgtagggacaatagaaagtacttctgagaattgtggttaccaagaacctagtaactgttggggaggagcaaaacaaagtacagaaaccagagggtacaatctgagtgagactgctatcagcttctggaggagcctttactaaaatgaatgatgagagtaactggatgatgagagtaactaatggatgatgagagtaagcaatgtctttggttttcttttttttttttttttttttttagcagacgtctcactcttgtcgcccaggctggagtgtaatggcatgatctcgcctcactgcaacctccacctcctgggttcaagcaattctcctgtctcagcctcccgagtagctgggactacaggcactcatcaccacacctggctaatttttgtatttttagtattttctggtgagggtccaggtttccggaaacaactcagagacatatgttaagatgttatctttagttttcacagggaaccaaatatgttacgactccaatttccttggctattgttttaagttaccattaccttctcgttgatcaagttgctcatttacttctcaagcctagctagatgcctggaatttcccttgaaggaagtcaagattttcctttatctccatactggctgatggtgatcgagtaagcccctaagaggggtccctgctccatctcgagatgctgctagattctacagtgcctaataaacagctctcgcctggccgacaaagagctgcttgctctctggatagcaattccaaagtgaacagacaacatcctgtttggaagactgccactctgttagaagaagcatcaggaaaacctttcttttgagctatttataactaacagcaattgaccaagtatacttttgtgagtgaaactgacctttctccctgtaagaattctccaaaatttggaaactatttgtgagtatttttacttatggcaatataattattggcacaagctcaatcagattcggttttctttcgtaacaggaaccattggagatactcattactctttgaaggcttacagtggaatgaattcaaatacgacttatttgaggaattgaagttgactttatggagctgataagaatcttcttggagaaaaaaagactgggtatattttcaatatgctttccttttaaggtccctcacctgtggaaagtaaagaatgtcactttctgacaggctcaggaacctcaagttatgtagggatctcaagaagatgggggaattcacccagttcatacaggtgaaattgctgttgcaaagattatgaatatgagagaagtccagcatggctgacttcatctcgtgtctggcctcaggctggctgcccttgctcactcttgggcataggccaagctagccatgggaggaatttagtttatagtttaactttgaagcacggatgataatagtctctccctaaaatgaaccccttccttgctcagggactgaaactacctttgtatgacaaatgaaagcccacaagattaagattatgagaggggcctgaattctgctaaaatgcaggtgtagctgactgataacaagtcattgtcccacagcttgcctttctataatctcttgcttctcaggagtcacatggccagaggtcctgagatttccagtcctgtgacccccacccagagatggacttagtgcatgaggaccattttccacacccctatgatttcatcctcaaacaatcagcagcaaccattccctagccccctgccttccaaattatccataaaaatcctagcctctgagttattagggagattgattaataatcccagtcctaccccttgggttgctctgatttaattaaaccttctctactgcaataccacggactcagtaaattggttttgtctgtgcaatgggcaagaagaacatgttgcatggttatacaggtactacaagcacagtctgatggcaaattattggttttgcttcctgcccttgatgtttctaaacatctagtccaaaattacttgtgaaaggtccagcaaagccaattttaaaagaggctatatggccaatcactattctttctacacattattgcaaataatcaggccacggctgggcacggtggctcatgcctgcaatcccagcactttgggaggctgaggcaggatcacctgaaatcaggagttcaagaccagcctaggcaacatgataaaaccctgtctctactaaaaatacaaaattagccaggcatggtggcatgcacctgtaatcccagctacttgggagactgagggaggagaatcacttgaacctgggaggcagagattgcagtgagctgagatcacaccactgcactccagcctgggcaatagagtgagactttgtctcaaataataataataataatcagaccaagtataatgaaattaaaatttattttgcaaataaattggtcctactacaatttatccttcatagaaatgtggaaactgaagataaaaaaaattaggtttcagaagaaaactatactacacctgttattagattctagccctaaacattgtttttgaggtttttattatttacctgcaatttggtctaaattctgaattatttcctgactacaagtatccaaggaataaatgggttttctttttctttatgatagttttagttggcttctaatgcaacaacaatttttattgtaatcctgtgtgcattctattcctactattcaaattattaatgttatagatctttcattgtagtacttctgaattaaccaaaatcacagtattctgaagatgattctacaaagcctgctgtttctacaaaggctgctgatgatttctacaaagcctgctgtagtgttgctgtggcctctgcttaaaaaagtagaaaacacattgatgcagcatgttcaccccaacctccctgcctaaaggctcagggaccatcttggaagaggaaggcgcgtgagattgtaagagccgaattagggggatggagtgtggagaataaggacacttcatcttggatgctcacctgccaaattgacttctgatgaaagccagctccagaaatgtgcctacagttactactttcacctaaaccctgcccttagtcaaatccttctcttcttctaagcaatcaacttcaattccttgtataacccacagtataaaagggcttttataccattctatcctattgcatgtaagccttgggtctgggaggtaacagtgtgggattccaccatctcatctccctgccacccaaacatgcctgctcttctttaagcaatattaaatgtttgtacttcagaaatttgatttgtcagcctcttcttcagactctcagcttctttggcctttgggagtaaatttgcataggcctgctcaaaacaggatgttctgggggtttgggggtgttgttttgttttgttttttgttttgtttagagacagggtctcactctgtcacccaggttggagtgcagtggtgcaatcatggcacactgcagcctcaaactcctaggctcaagcaatccccccaccttggcctcccaaagttctgggattacaagcataagccaccatgcccagccctggacttttctttaaagacatttacacagtgtaggaattactgtgggtgcactgctcaggtccccttctccaggatgctcattcctacctcatagatgattttcctgcagagatttgacctcagctgaagggcagtcacctggtccaggtggttgctattcacctccttcctgagaacagccaacagccagggacacgctagcacagagatataagagcgaccaaggtgaggccccttctgtgctgcggtgcatgctccagagcctccctgggatcagacttaagagggtctccagccagatctggtcttcgctgctttcctcgagctccccagcgcactcctgcaatgcatcttttttttttttttttttttttttgagacggagtttcactcttgttgcccaggctggaatgcaatggcgcaatctcagctcaccacaacctctgcctcgcgggttcaagtgattctccttcctcagcctcccaagtacctgggattacaggcatgcaccaccacgcccagctaattttgtatttttagtagaaacgggtttctccatgttggtcaggctggtttcgaactcctgacctcagttgatcctcctgcctcagccttccaaagtgctgggattacaggtgtgagccactgtgcctggcccaatgcacctcttgaatcacctcctcatgctttgcttttagagaacatgatccccaacatgtgattccagcaaagattctagaaagccaaccgtgacaatcacttctgggtttagatgacccccccccaccacaagatggcagtgagcacctcatcacagaggtgctgatggtctgcagcaccgcgccaggccagaacgtgccttttacagaagaaaataacccagtagctgactaggatggtgaggagggctggtgagcactgcggtagtgagagggacactagcatcactgagatgcaagtgatggtcatttttcataggtcaaagctcaaagcaggggacagttacagggcagggcttcatagcaccagtgtgatgaaagtatctgggagtggctaaggccagcactatgccatgggaagcaaggtgggcctgaggaggaggcagcagcgtcagcctgcaacaagtgggggctgccctgcagagacctaagagtcatgttatagagcacagtgtctgtaaggccaagaagtgtggacagccaagtgtgtcaattactagacatactcaagaggagcaggaagggcagggcatggtggctcatgcctgtaatcccagctacttgggagactgaggaaggagaatcgcttgaacccgggaggtgaaaattgcaatgagccgagatttcgccactgcactccagcctgtgtgatgggagcgggactccatctcaaaacaaaaaaagaaaaaggaaaaagaaaaaaagaaaaacctaggtatacttctcaagcaaataaaaataatcaaaaccaatatcatgcccgggcacaaatttcatatatataacagatttaaatatatgagggtgattatcctctcatatctccatttttttttgtttttccatttttttctttactaaaaaaagttaatgccaatgacacacaatttttttttttttttttttttttgagatggagtctcacttcttcgccctggctggagtgcaatggcgtgatctcgactcactgcaaagtctgcctcctgggttcaagcaattctcctgcctcagcctcccaagtagctgggaccacaggagtgagccaccacacccagctaatttttgtatttttaatagagacggggtttcaccatattggccaggctggtctcaaactcctgatctcaaataatctgcccgcctcggcctcccaagattctgggattataggcgttgagccactgcgccccgcctatgtatgattttttttttaattttattttcataagtttttggggaacaggtggtattttgttacatgagtaatttctttagttgtgatttgtgagattttggttcacccatcaactgagaagtatacactgaacccaatttgtggtcttttatccctcacccccttcccaccctttcccccggagtccctgaagtccattgtatcattcttatgcctttgcatcttcatagcttagctcttgaacccttactttctgtttgagggagaagacatatcatctacaagtagatactgtgtaaacattccattgcatgactatcccataacttatttattatttgtgtttggttatttgctgctatgtaacaaccccactcccaactaaatggtgtgacaattccatgattctgtggatcaaaaattctgaaaagtcaaacccaaggagttttgtctctgctccatgatgctaaagcctccgcaggggtgaggcgaatggctcagggtgactgaaaagctcagggttggaacagctggggatgaggcctctatgtataagatgattcttcactcacaggtctgaaactatggtggggacagccagaaggctcggctcagctgggacagtcacctgagccctacacatgacctctccaacatggtgatcctgaagcagttgggtttcttacacagcatcacacttttcttttttttttttttttttgagatgaaatattgctctatcacccaggctggagtgcagtggcacgatctcagctcactgcagcctccgcctaccaggttcaagcgattctcctgctccagcctcccaagttgctgggattgcaggcgcctgccaccaagcccagctaatttttgtatttttagtagagacggggtttcaccttgttggccaggctagtcttgacctcttgacctcaggcgatccgcctgcctcggcctcccaaagtgctgggattacaggcatgagccaccgcgcccggccaaagctcacacttcttatgattcagccttagatgtcacatcagttcattttccccacacttattagtgttagaagtcacaagcccacccatactcaggggactggcacacagaccccactctcaatggaaggggtgggacaccaccattcctgctgatgggcatttgggtaacttcctgtttgaagctattaagattgggctgctgtggccgggcgcagtggctcacgcctctaatcccagcactttgggaggccgaggcgggcggatcacgaagtcaggagatcgagaccatcctggctaacacggtgaaaccccgtctttactaaaaataccaaaaaaaaaaaaaattagctgggcatggtagcgggcgcctgtagtcccagctactcgggaggctgaggcaggagaacggcgtgaacccgggaggcggagcttgcagtgagccgagattgtgccactgcactccagcctaggcgacagagcaagactccgtctccaaaaaaaaaaaaaaagattgggctgctgtgactattctagtaggtgtctttggtgagcgcctacacgtgtttctctttttctctttagtatatgcccaggaggggaactgctggctcccagataccgtatgttcagggtcacacacacttccacagggttttccaaagcccttgtaccagcacgcactcccagcacctgtgtgactgctccagctgtcccacagtctcatcagttctattgctgatattttcattttagcttaagttatatttaataggaaaattaccgttgcctctgccccccgttcctgcctgtaggagtttctcgtagctgttgctacaggtggccacaaatctgtcacttaaacccacacaaattgatgtccttatggctttggagtcagaagtgtcaactgaaggtactagcagggctgtactgacctggtggcctcagggagcatctgtgctgcttctccaccttctagaggctgctgcatccctcgctccagccccttcctgacaccactcaccctcctacttctgttatcacatcctcaccttctctgtgttcagggctccctctgtctctctcttgcaagcacacttgggattccattgagggccacccacataacccaggagaatttctccacctcaatatccttaacaactgcagagcccttttgccataaaagttaccattcacgggttccagggattgtgacatgggtagctttaggagtgattattcctgcctgtctcccgctcaccagaacttggactttctctctcaacaggagccccctgtgtgggaatagcctgtctcaacgacgccctctataaggacctgcttcctcaaaggacctcatagtcgggtcctgcccctcagtgtccagtctgccttggctggaggggctgcaggggtgtgttggcgccacctggtggagacagggcatcacagcaggtgggagcccagtagaagcacaaccaaaacatgggtaatgtttaaaattttctggctaagcgctgtggctcacgcctgtaattccagcactttgggaggccgaggtgggtggatcacatgaggacgggagtttgagaccagcctggccaacatggtgaaacatcccctctactaaaaaatacagaaaaattagctggacatgtggcgcgctcctgtaatcccagctactcgagaggctgagacacgagaatcgcttcaaccccggaggggttgccgagatcgcgccactgcactccaggctgggcgatagagcgagactctgtctcaaaaaaaaaaaaagaagaggggaggcgaggggaggggaggggaaaagggggaatttgtttggagctgagacatccatcttctcctgacctcagatatttgcactcctggttatgaagccttcacacttggactgaatacaccaccagctttcccgatttccagcgtgcaaatggcagatcgtgagacttctcagcttccataattacatgagccaatttatatatataaattgggtcctccagaaaaacagaataaattatatatataattatacgcataacttaattaaattatacgtataacttagctatatatataatttattctgtttttctgaagaaccctactgacacaaatgttgagcatcttttcatgtgcttattggcttaataacttgtacatcttctttggggaaatgtctattcaagttctttgcccattttgtaactgaactattaatatttgtctttacattgttgagttgtaaaagttccttatatattctagatactagagccttatcagatatatttctgcaactattttctcctaatatataggttgtgtttttattttctttttctttttttttttattgagacagtctcactctgtcacccaggctggagtgcagtggcatgatcttggctcactgcagactcgacctgccaggctcaagcaattctcccacttcagcctcctgagtagctgaggttataggcacttgccatcgcacccagctaatttttgtattttttagtagagccgaggtttcgccatgttgcctaggttggtcttgaactccctgcctcaaagcgatctgtcagcctcagtctccctaagtgctggaagtacaggtgtgagccacagtgcccggccatctattttcaatagtgttttttgatgtacacaggtttggaattttgataatgttcaattcatccatttttttttttttttttttggttctttctactggaccaccactcttgagccctctaatccaacctccacgcggcagccagagggagctctctaaatgtaattactctttccctgctccacctgctcaaaacagtgtcacatttgtgatttaaaacagtatttctcaaacctaatttgcaaacaaagcaggtggaactcttcttgtatgcacagcatctgatttggttggtctggcatgggtctgggagtgagcacacctaccaagcggctgctggggtaacttgcgttttccactgatgatttcagcaatgtttccggtcccacatgctcctccagaaccttgtactcccccatgaaaaggtggagtccatttccccttcctttatttatttttttgagacgaagtttcactcttgttgcccaggctggagcgcaatggcgtgatctcagctcaccgcaacctccgcctcctgggttcaagcaatgcttctacctcagcctcccgagtagctgggattacaggtatgtgccaccacgcccagctaattttgtatttttagtagagacggggtttctccatgtcggccaggctggtctcaaactcccgacctcaggtgatccgcccgcctcagcctcccaaagtgctgggattacaggcgggagccaccgcgcccggctatttccccttcctttgaacctgatcaggacttgacgatggcatcaacatggtgagagtgaccctgcatggcttatgaggctgggttacacaaggcgatgttgcttctgactggctccctctcaggatacatgcccttggaacccatcctctaagctccttgggagcccaacttagcccatgtggagacaagacagggagagaaacagaggcacccccagccctcagccagcatcaaccgccagacaggagagcaaatgcgccaacaatgattccagctgaagcctcagacagcgtggagcagagatgagggatccctgcagattgcagatgcgtgagcaaaatgcatgctgtcactgttttgaaacaacaatgtctgggggctgtttgttatgcagcaatagacagctgtaacaatgctgttactgctgtattccatgaatgactgcactttgagtagcagggggctagatcactagataagccccatggcttctgtgtatgctatttttctacttttatatccttttcattcactttttttttttttttttttgagacagagtctcactctgttgcccaggtgggagtgcagtggtgcaatcttggcggactgcaacctccacttcccgggttcaagcaattattgtgcctcagcctcctgagtagctgcgactatagatgcacccccatgcctggctagtttccgtatttttagtagagacggggttttgccatgttggccaggctgatctcagactcctgacctcaggtgatccacccaccttggcctcccaaagtgctgggattacaggcgtgaaccactgcacccagcctcattcactttctttacttggctcatttttccttgttgcctcaattctcctctaagatcactttcctgacatttcagcctgggcctgttgccttctctgggtcccctccgcctcctgtgcctcccccatctcagccttgatccctcagattatacttcctctgtccccaccctgaccatcttggctgtccctggatagggatgggtatcttctcccactggtctgggagatctggaaggacaggcctggaaaagacttggtcactgctggaaggagctcagttagtgtggtgctgaggacagtacgggtgaggctggccccttcacccaaactcccactctcttccatagatttcacctctgtggcccaggccataggattagggcaactccccttaaacatcgagtccatcctccaagctgtccttttttttttttttttttttttttttgagacagagtctcgctctgttgcccaggctggagtgcagtggcgcgatctcggctcactgcaagctccacctccagggttcactccattctcctgcctcagcctcccgagtagctgggactacaggagcctgccaccacacccggctaattttttgtatttttagttgagacggggtttcaccgtgttagtcaggatggtctcgatctcctgacctcgtgatccgcccgcctcggcctcccaaagtgctgggattacaggcgtgagccatcgcgcccggcctcatgctgttcttgaatagtgagcacctgttacaagtcgccccaccagcctctcacttgtacccccctcatctctttctccccaagagacagaggaccctggcacttgtgaagcatgacccagaccctggggccatggcatccaacatcctcattccccatgacccctactgtctagatgtagctgccaagagacccccagactccccgggcctctgtctagagtgccaagacagagagagaatgccctgccgcttgcatgctttgtggggtgtccttcccccttccctggctgctaggcgtgacttcaacgttctccccaacccccaaacagcagcactgacaccagctgcagacctggctcaggttagctaatgaggaccaggctggggatggagcctgaacccctaaaccccagtcctgtaccccaccctaatcctggggtctccactggacaaaacgaagcagcttggtttttcgttgttattgtttttgagatagagtatctctctgtctcccaggttggagtgcagtggcgtgatctcagctcactgcagcctccgcctcccgggttcaagtgattcttgtgccgcagcctccccagtagctgggattacaggcgcgtgccaccacacccagctaatttttgtatttttagtagagacagggtttcaccatgttggccaggctggtctgaaactcctgacctcaagtgatttcccagcctcggcctcccaaagtggaagcggcttatttttaaggagaaaactcccgtggaaaggaatcagcacctcctctgtcaacatttcacttctctgaaaagactctcacttccaacagaaagtgctttgtaacacaacaatgaggctgggcgaggtggctcatgcctgtaatcccagcactttgggaagctgaggcgagtggatcacgaggtcagaagttcgagaccagcctgaccaatatggtgaaaccccgtctctactaaaaatacaaaaattagttccgtgtggtggcgtgagcctgtaatcccagctactcaggaggctgaggcaggagaatggcttgaacccaggagatggaggttgcaatgagccgagatcacgccactgcactccagcctgggcaacagagtgagactccgtctcaaaaaaaaaaaaaaaagaatgagaacatatggacacagggaggggaacaatacacacaaacaaaatttagaaacaggtgaaaataattttagtaatatttttactaatactgatatgctcaaaatattattatttcaataagtaatctaaaaattattgagatgtcttatgttcttttcatcatactaagcctttaatatttggtgtgtattttacactcacagcacatctcaatttgcagtccccatgtttcaagcactaaataaccatgtgtgtccggtggctaccatactggacagcgttgatctgaaatcgcatctgtatgcatcaccagcatatttgcagagatccccatctcagcagcacacctgaggctcatctgcgaaagcacctgcaacttctctacaacctcccacatcacctccaaacacatcctcatgtcatctgcaaacacacccatagctcacaggccaatgcctaaatatcattgcaggcaccttcagagaaagcacttactaaaggggtatacttgattccacatctgctttgacctgcaaatctcccttctcctttacatacatttgcatctcatttgtatgtcaatctaaatccactggcagagcctcagatcatcatctcaaagtcaggtggatgtggggctgggcaggcctccaggtgttcctcctcctgcttcctctggggctcttgatcctcctcctcttccttgctgctctcctcctcctcctccaatatggtgaccagttcctcccgcagcgcccccatctccagccccaggctgcacagctgtcccagcagctggacatccactcggcgcaggttcccctgccagtaggaaggggacgtcacagggatgccaccccagagagcaaggggtctctccaggacctgggtgagagcaggtcccaactcatgtcctggccacagcgcctgggcagggtcctcactgtgcccatggaccctaactgccttcctgcttctcagagtgtctcttgatctctaactcttctctttgtctctccatttcattgtccctgacttctctctctctgtctcctccctctcttatctatatctgtccctgtttccctttgtctctgtccccatttattttttgtctttccatgcccctgtctctctgtctttatgtgttgccatttctctgcccctgcctttggctctctttctctcgcttgccctctctctgccctccccaactttctcaaattcagtctgtctctccatctctgttcctgctctccgtctctgcttcccacctctgtccctctcttttgggatctccctgtccccacctctgttcccgtccctcactctatgtctgtctctcggtgtctgtacatgcctctcatgtctctgcttctatctctcagattctgtttttcgatctctggccttctctatttttgttcatttccattcattctcatttcctctctttctctttcccttccaaacccctcactcaccagctcctccctgatccacagcagactatcgcaggcacctccagtgtctgcccctgcagtcctgagggtctgaccagggatttccactggggagacctccctcagggcctgggggggtgggcccagccccggaggcaccagtccagcctgattcagctgcctccacagttccatcgtctctgagctatggctgcaaggagcaggaagtagcaaggtccagggtggcctggtcccctggggagctgtgtgcgtggtggagagtaaagggcagagggagtgggatgggggttcctgggaaaggtatcccaaagtccactcttcagagagaatcagctggccttgtgcttttctttttccttctgaagtctaacctcaactctgctcacagggttcaaacatagcctcttgcagaggtctaactccacccttccctgcctgtctcaggcctgacccctcaggggcgctcagtgtctgtagatgcctggcaccctctgtccttccacctgccccccaccaccacttctccagcctctcctcagcctccatttgacctctggcttgcccatagcttggtccttgcttgtcctcttggcacgggtcatcctagggctttcccaccagtgtgcctttgggggcaggaatggctcccaggggcaccaagacagcaatcccttagctggagtgcctgtgtccaggctgctggcctagggccaagcagccaattctgctgaccctggacttgcctatgggtatattatccctgttgagggtgagggcttctgctgtggaaaagtctgggaagcactgcaggcctctctcggccttggacccttccttcagacccaaggtgcatatatatacatatatataatggtagatcacgaggtcaggagatcaagaccatcctggccacatggtgaaaccccgtctctagtaaaacacaaaaaattagccgggcatgctgccgcgtgcctgtagtcccagctactcgggaggctgaggcaggagaatggtgtgaacccaggaggtggaggttgcagtaagccaagatcacgccactgcattccagcctggcgacagagcaagactccatcttaaaataaacaaatgaacaatatatatatatatgtattttgttttttgagacagagtctcgctctgtcatccaggctggactgcagtggtgcaatcttggctcactgcaacctccgcctcccgggttcaagcgattcccctgcctcagcctcctgaacagctggggttacaggtgcacgccaccacacctggcgaatttttgtatgtttagtggagacggggtttcaccatgttagccaggctggtctcaaacccctgacctcaggtgatctgcccacctcggcctcccaaagtgctgggattacaggcgtgagccaacgcgcccagccccaagtcccttttaccatagaaagtaacatagtcacagtgcccagggattcacaggtatggggagagggttcgttattcagctgccacacccaccttcctaaacctgctgcccttccagtttcctcacgtgcacagccacgcccgtctgcttttagtttctcaatctgttggcttaaccttcaaaacaggcccaggatttgagcacttctcaccattccctctgccccatccccattcatctcttgcctagactgctacagcagcctcttttactggtcccctgcatccacccttgccctctaaggcaagggtccccagtccctgggccaaggaccagtaccagcccctcgcctgctaggaactgggccgcacagcaagagatgagcagcgggtaagtgagcattaccgcctgagctccgcctcctgtcacatcagcagtggcattagattctcataggaggcaaaccctattgtgaactgtgcgtgcgggggatctaggttgcctgctccttatgagaatctaatgcctgatgatctcaggtggaacagtttcatcccaaaaccatccccaccccacccccgacccccagtctatggaaaaattgtcctccacgaaaccagtccctggtaacaaaacggttagggaccgctgctctaaggtacattctccacctggcagaaataatctttacaaaatgtaaatccgattttgacactcccttcttcccactgtgaatagaataaaaccctaccaggcctgcaccgtcagcccctgcccacctctcaacccagtctcctatctctgtctgcaagctggttcccacctcaaggcctctctgctctagaggctacctctccctgcagcgcttttcccctagatctttgaatggctctttccttatcattcacttctacttcaatgtcacctcttcagagaggcctttgctgatggccctacacccagtcacttttttttatctgcttctcatcaaaattgccttgctgattcctttgtttcttattcatcctctcccacatccatcctctcccagcccagaatgttgacttcctgagagagggactgggtctgtcctgctcaccatggtaacctcggcatctagaacagtgcctgccatcacgtggtaggtgctcagtaaatattcttggaactaatgaatgaataattctatccacaagacttcacaatggctcttcatgctgcgatctagctttcaactccaaactggtcttgagatctcacctcagtctctaaccttgacatctaacctcttcacccactctcttacctgaccctaatttttaaaaatgacgtggtcagcttttcagccccctcattccctgtttttaggaggtagtgagtggaagctggaagaataagaaagcttggggagactgcaattgcagtcaggaaagaaaggtactctgccgggaagaacaccccatcttctcctagggaaagattgtggagtcctggggtttgttttgtttttcaattttttgttttaagagacagcgtctcgctctgtcacccaggctggagtgcagtggcgcaatcacagctcactgcaacttcgacctccccggctcaagtgatccccccgcctcagcctcgtgagtagctgggaccacaggcgtgcaccaccacgcccggctaacattttattttttgtggatataaggttgccctatttctttgtggagataaaggctcccctatgttgcccaggctggtctcgaactcctggcttcaagcgatgctttcgcctcggcctccacaaagtgctgggttcacaggtgcgtgagcccgacctgtgtctcgttttgaagctcagggagagggcgctgtgagcaatccctaaaccctttaagagtaaaaagtgcgtgcacctttaagaggacggttagaaaacgcggggcgtggccacaggagaataagttcgcgctgaaccaggagcgtgggataagaccggccccttccggttacgaaaccttagcaagatggcggctccctgggcgtccctgcgcctggtcgcccccatgtggaatgggcgtatcaggggcatccatcgcctgggtgcggcagtggccccagagggcaatcagaagaagaaaaggacaatactccagttcctgaccaactatttctacgatgtggaggctctgagggattacttgctccaaagggagatgtacaaggtgcatgagaaaaatcggtttcgagacaaggagtggatcaggccagataagtatggccatttctctcaggagttctggaatttctgtgaagtgcctgtcgaagctgtggatgccggtgactgtgacatcaactacgagggcctggataacctcctccgcctgaaggagctccagtccttgtcgctgcagcgctgctgccacgtggacgactggtgtctcagccgcctctacccactggccgactcgttgcaggagctctcgctggccggttgcccccgcatctccgaacggggcctcgcctgcctccaccacctccagaacctccgcaggctggacatctcggacctccctgccgtgtccaaccctggcctcactcagatattggtggaggagatgctgcccaattgcgaggttgtgggagtcgactgggctgagggcctgaagtcagggccggaggagcagcctcgggacacagccagccctgtccctgcctagcctttagccctgtccccactcacgtggcttctcagcgggctgcatggaatgtctggtagctcaccacacttctggcttccatttgtcttcactcaacgtcagggtgggggagtggtgctggccaatcacaggagagagcgtgagttcccagtatttattcctggctgcccttggctaaaggtcacagctcctgtcaccctgtcaggcagccctttccatgcccctgttcaggcctggggaggtaaaggctcaggctgttagtagccgcagagagccacactcaccttgtcaggagactcttctcaaactgtccttatgtgagtgcactgccatttcttgcagggaccctgactgacacaggggctactactgacactttacagggatggttctcccccgtgcagggccgctgtgcccactgcaggacatgcagcatccttcgccccactccactcactaaaggccagcgcaccccaggccccatagtattgctggttatggatttattgactttatgttccaaattcagctttttcagttggctgttttttgaaaggggataagctttgtcagtagagggcaccgaacaggcattataggaggaaaggcgcctccttcgtggttcttgttggcctccactgaggcacctctctgggaataacgttccccagcaccccaaatggatttccagtcaattcagaagcattttaccagtgaagccctcattattccagttcactgttaaagccagtaattctctatattaaactttccctgttcggtttatggagtataaaccgaacagggtcttgggaagggacagtgtctaagtgtctgggtgccatccagagcatttggcaggggcagctgcaggatgagtgtgttcccaggggagtgagagcagcagctatatggcacttgtttgctactgccctctttttttctttttgccaaacctgaggtgactagtgtcacaggtggagcccatctcaca

SEQ ID NO: 735328 - DNA, 188005 bp, Homo sapiens
ctccaaggctgagggatgaggagacctgctgaggacccagggccttatctttccatcccactccataggtcccagtattgactgatgctgtcttcacctcctagcctcacttttaaccttctggcacccgcccaccactgtccagttcactattgaagccctgccgtccagtgctgcagagggaaaggatgttcttctactggcctgcaatatttcagaaactattcaagcctattattggcacaaggggaaaacggcagaagggagccctctcattgctggttatataacagacattcaagcaaatatcccaggggccgcatacagtggtcgagagacagtataccccaatggatccctgctgttccaaaacatcaccctggaggacgcaggatcctacaccctacgaaccataaatgccagttacgactctgaccaagcaactggccagctccacgtacaccgtgagtgattcccccatacctctgggtgctggcggtcagttctgcttcacacacatgagattgtcaggcctgggctgtgcctgcatccccctctgcattttgtcccgtgttgagatttgggcatttagtgcaggacacacacatggtaggtaaacttcaacagatcagaattcctttcctgcatccaggccctgcagacactgatggcgggggcgggggggcctcagcagggggaggtcagtctcagccaagcaccccatgccctccccatgaacctgaccctgagaaagaccctggagaactgggtcagggcctggcctgagggcgtcctgggaacctcacaaaagcccagcctcaggactcctgactccgtgtgaccccgggaagcctgtgtcagggctggggtgtggtctcctgggcagggcttactgggagcaaggatttaccagatgtctgcgggctgtggttcctgaagcttctcatcagtgagggctcagctcccagagtctcatctagacaaggacagagcctaccactttccctgggactcagcctggagagggcagggggacaggattactagggcattggccccctgaatgaggagcttaagagatgcccttgggcagtcagtggcccaggggtaggaacagaggggagaaaatgttcctggcagcttcttgtccaccggggatcatgcccaggggtgctctcccatggaggcaaataacagatgctgttgatgtgaacacctcctctgtgccaagcttcatgtcagatcctgtgaataatttaaagttcattcacagacaaagtggcaagcctcagaccattttccatttacatattgtatggaggggaaactgaggcacagagagatacagacaccggccacggtgggcagatcgcagctggcagagtcacatgagggctgtctgcagctgctgccacgtcctctccttcatccctggtgccttactaggtgtctgtggaccttagaacagccactggttcggatgttttcttcttaggtgtctacagctcggagggggagattctggtctggagagttatgagtaaatacagaattaatcagttttttcttaactaaatcacctgcctcaacaatcagtcagtgctggggaagttcaggcctcctcgctcaggtccacaccccgcatctctggacatgaaatggcttcgtgtgttttctgatgtgtgggtatcattccaacaggaggataaaggggaggactttgctttctctccccattcacaccctgcaccagccagggcccagtgtgagacacatactccgtagttctctcatgaaggagggagggaatgaatgaaggaatgatctataacctcttcagagacagagacctggatacaagatcctaggaggttctgggcccaacgtgagacacacactctgtagttctcttatgaaggagggagggattgaatgtaggaatgatctataacctcttcagagacagagatgtggatacaagatcctaggaggttctggccacacctgttttctgtccctctagagcctaagacccatgtctcattcatctggcccgtttctcctaaatctgcccctgggagctgagtctcatctgaccctggggctgcagggctgtgggaaggttttcaggggagggatcaggcttgcgggtagtcccacacgtttgccttacaccctggagctctacctggttctcactatgaatatcccataataatcccccctatcctttctggggagtagaaaaaaagtaaatatttaaaaatatgccagagcatctgttcttcttagcaagttcagatagttattagttagcaggaataaatcgttattttaccagagcctcacctgctgggggtttatgggagcctaactgactgaggggggtgggaaatatccaactccagccccctctagccatcatgtcccacctaaaggagagaaaaaactgagaggcacttgtgacattcacagcccagggcacagactctatccaggaccacagaacccctccctccccccactcaccaccgcatcactgaacgcctgctcacccaagttcctgttgcccagtacatcatgtcctggctttcaacaaaaactacaagacagactagaggcaaaaaaaaaaaaaaaaaaaatgcagttcgaaagacagaacaagcatcagaaccagatgcagatgtggcagggatgtggcagggatgttgaaattatcagaccaggaatttaaaacaactctggggccaggagcggtggctcatgcctgtaatcccagcatttgggaggccgaggcaggcagatcacctgaggtcaggagttcgataccagcctggccaacatggcaaaaccccgtctctactaaaaatacaaaaaattaggcaggcatggtggtgggtgcctgtaatcctagatactcggaaggctgaggcaggagaattgcttgaacctgtgaagcggaggttgcggtgagcctagattgtgccactgcactccagcctgggcaacagagcgagattccatctctaaaacaaacaaacaaaaaacaatactggctaatatgctaaaggctgcaatggaaagcatagacaatgtgcagaacagacggatgctgtgagcagagagatggacaggctaagaaagaataacaacagctactatatctatctatctatctatctatctatctatctatctatctatctatctatatatatgtatatatatgctagagatcaaactcactgtaacacctggatctcagagtggttgtgaggatgtttattaggagattaaagagattaaagcagagttatacacagggcgagagctcaactgatgctatcaactagtattcttatttttttgatgttgttattggcaataaaatcaggaacaatgcagtaaaaatttggttttatcatgtacgagttctgtgaccttccttgacttactgaggtactgtaagtctcagattctaactctgcagatggcggtgatgcccctctccctcaaggtgatgtgaggatgagatgagctgtaggtaggttggtgcccactgtgcctggcacatggaaggcccctgaaaatagtcaatgaacatcatccccgctcatcagcatggagttgacagtgagggctcgctctctgtgacaatcatggaatggaaaagaagaaacaagaggaagactgggcgcagtggctcatgcctgtaatcccagcactttgggaggccgaggcgggcagatcatctgaggtcaggagttcaagaccagcctggacaacatggcgaaatttcatctctactaaaaatataaaaattagcctggcatggtggcacaaacctgtaatcccagctacttgggaggctgaggcaagagaatcgcttgaacttgggagatggaggttgcagtgagccgagattgcgtcagtgcactccagtctgggtgacagagcaagactccatccaaaaaaaaaagaaaaagaaaaaagcaacagagggaagaggtgtgacatgagaggaagaagggatttaaaggtacaggagcagggcgaggtgcaagcacctgtgggagaatgtaggagttggtacatcccagtgtgtcaagtctgagacacagaaaatggtgcaaccgtggagagcaagggagtcagctatgaggacagcccaacagaccacactcaggctctggagcatttccttcctccctgactatgcccctgccctgcaatgccccttatggtttcccttggaacaaacttgggccttgtcccctttgccttcccctttctgcagaaaacaacgtcccaggccttcctgtgggggccgtcgctggcatcgtgactggggtcctggttggggtggctctggtggccgccctggtgtgttttctgcttctctccaggactggaaggtaccgcagcttttccccagcctcctcccacccctaggctgaccccagtcagggaggagggagaccccgccctgtattcagggccaggctttccgcatcctcccaaggaatccttccctctcattccatggctcctcccttgccagctgctgatcctaggctgcctcttcctttatgaatgtggcacagttaaggttgcacccctgagtgctgtcctagttccctaacacagcaaagccacagctgcctggagggaggaagggagggagggagggagggagataagacgggagtgctcagaacctggtaccttctgctgttcattgaatttacccacccagtgaggagggatttgcaggcttgagatccatggtgggggtcctgggcatggtcacgcagtggggagtggcaaagcctggacaggctgggtagggtcagcaccccatcgtgattgatgtccctgaggtgtgagatgggagaacctggacctcaggacctgctgtcctttatgtctcttgccaaggggtggagagagagaggacaaggccattgccccatttcagcatctccaggcctgaaaggagggtctggccatggcagggatactgagttctgggagaatatgatacatgctccttgcctccccatgcccccagctcccccagtgtcctgcacacacagccggccctgctttccctctggggccttgacccttcctctcaggcaaacgcaggtggtctgattccctccctgagtcctcagtccctttcctgggtccctgggtcaatgttctcctcacccggcatctgcctgggggggtccttcctctctggccaggacagacgtgactgcttaaggcctatcctcagctccccgtcctcggccgctcctaccacgaaactgatggagacaggaggccttcactccagtccttgaaaatggagtcccttccttgtcctttattctgcccctaaacctgtgatttctccctgcaccctcatgaataatcctgacctttcctagggccagcatccagcgtgacctcagggagcagccgcccccagcctccacccctggtgagtgtcccttcagcccaggtgtgggagcccctaggcctgccctacggtgtccactcctgccagtcaccccctgggggcctctgaccctttctttggggctgcaaggaggatgtcaggaaacatgacacaggggaccccgactgtcttgttcagactgatctgtgggctctgggtcgtgggtcacctcctcgacctcagctgctcaggtctcccctgggaagaggctccctctccctgattctctgggagctgaggacccctacactctcctgcaggaggggcccaggctctcctcccaccctgctgctcactcctgtctctgtccccaggccatggtccctctcacagatccaccttctcggtaagcctgttccctccccagcccttttctactggggtcccaacagtgcaggctcagggcagggggaccatcaaccccacagcacagcactgacccacctttccccagaacagtcaggtcaaagtgagtgcctccagccaggatccgggcctctctacagggccaggaccacccacgccatgtgctgacccctccccgggaccctctacacctgaggagaaccctggagtccagcaggtgcagaatggacactgggaccatcagtcagaggcccacattaacaagggtgcggggtgggcccagccaggacaggggtcagggtgttgtgtccacactgggaggctgagctcaggggcagagctggtcaatcctgaggggaaatgagtggaagtggaggcagggaagtaagtcctggccgatcagagacaggaaccttccaggctgggcttccgtgaccctccctccctgtcccctgacatctcctctctcccctgcccaggcccctctacccagccccagaacagccactcccatctatgaggtgagtgtgggccatggatgttctggtcccgcaggctccaggggacccaggatctgcccccaccagcacctggctgagctcagattcaggaaaatgcagtgaaaatgagaacaggtggtggtgagcagaggagggaggggcctgggaacagggaccccctgagcacagccaggttcagccccagagaagccctgggtgggcccagagcctgggagatgccagacactgttctgagaaggctacaggggttgaggcctcttctctgtttttacaggaattgctatactctgatgcaaacatttactgccagatcgaccacaaagcagatgtggtctcttaggttcctctgggagctgctcttgtgggttgatggagcgtccccaaagctcccagccctggggacggggaaggacatggagcctgagccagagaaccagctctgagtcctgaggagacacaggcctggggacagggagggatgggagtccctgctgaatatctggagaccctgacaggttgccctgggctctgggtgggccgggacaaaggcctctcatcaccacaggaagcgggggcttgcaaggaaagtgaatgggcctgtggcccacccggggtcaccaggaaaggatctgaataaagaggacccttcctctcattggctctttttctgctcacgggaacttagcagaaactcacctgaaactccgtgtccattctctcccgggtcacacagggaaaatatctccaccttgtctcaaccacagtctctcttccctgggaggcagaaataggggttgggagtcaggctggggtgggccctacacaggaaagggcaagattcacatgagccctgcccagccagccgagcgctcagctgtcctcacactaccccagggaccaaggccatgcacagccccagcctgggtccctctgtgaatgcatgtggggtctcaggagcacagaagatggggccatctgatgtccacaaaaggtgagcaatgcgggagcaaccatgggtggtataggttgcggctgtggcccctacgcagcctccagtgtcctgacccctgctgccctcttcacccaggccctggaggcccagtctatcactgtcctccacaaatgaacttacctgtccccaaatccaggatcctgtgtgcttatacctggccactaggttctcctctgtcccagtggctactgctcaggacatctttatccctggtggggcacagagaggggctgtcagagcaaccaagattaatacagacgcataattcagtccttgagcactacccaggactctggcccctcattgctcatcagttcccactttaccccctggcatggatctcactgagcaagccaactctttacacaggagcatccaggtcagaggtgcaggactcccccatctaaagctcatgcaggctcccatggcgatgggacaacctgtctgctcctctccctggcccacagccctatctcgcctgcagctcctccacacacctgggacagcagttctcagcccttccctgagggcccctggaagggtgatgatctcatataggttcacttgaaccaggtgccaccttcccacaagtgagctggtgcctgcactaaagcacagagccacagttcccaagagtgttctgccactgccacaggtcccaagagtgttctgccactgccacaggttgttcgtcctgagatgagaggtaagaaaacaacccgcaatgggttgttttatatcgggatttgcatcaggatttagctctaaatgacccctgatcccacctgcacacagcgtcagatgagacaaggtgaggcctctttagttttctgttgaggctgtgacaaattaccacaagcttagtgacatagaaacctgaaccaaagtgcccacatggctgtgttctttctagaggctccagggaagagtgcatttcctctccttttccacctcctagaggcctcctgcaaccttggctgtgtcctctttctccatcttcaaagccagcagcacagcatcttgaaactattctgtgccctgcttccatccccacatctccacctcctcccacctccctctctcacttaaaaggaaggagccttgtggttattttggacgcacctgggataaaccacaacaacctccccatctcatgatccttcctttaatctgtaaagtgtcctttaccacgtgacatgtccacagatctggggatgaggatgtacacatctttgagaggcccttgttctgtccatcactcctctcaaggccatcttctcatcatcgttcactacaaactacacatgggcacctggatgggttcatcatgactgtggcgtcagttcctgcattaacatccccagcaccctccagatcctgagagagggagacggagggctctccatgcccctagtacctctccaccttcttcttggtgacatgcttagttgctaagaataacagaaagcggaggtgactgaaagatcacaactcaccggcccttcaatagttcgtggacatcagcaccacggacagtgactcagtgaggctaatttccaggtggcagcagggagcatgcagataggagggaactgcaggaaaagctgcccattctattctatatgagaaagagtgtaagaaagaggaagctattacagggataatgctattcttctctaatccataaattgcgaaacctttgcatgtctggatatcatggtttttagcacatctgctgccactccctgcagggctgattgctgcatccaggatgtggtctcttggggggctcacagcctgctttggcctcatggtgagtctccctgcccctgacactcaggccactgtctctgcctacaacatggtgggaaccttccatgattaacgtctgattctctgtgcctgacctttgaagcacatccatcactcagcctggagcatccgctgagctcagcatcctgctcctccatccccagctgagcccttgaggagatgcttgagaggatctcctgggctcctctgtgagctcctccaggctgagccttgtgcttggtgtcagaggcctttgccatctgcttgttctttccataggcaaataatcctcctcagggacaagtggggcctgaagatctgtctgaatatctatctatctatctatctatctatctatctatctatctatctatcatctatctatatgtatgtatatatgagaatgctttattaggcaaaactgcatactatgaacatgctttaaaatgcaacaggatgagatgtgaagacataaagaacaagtgtgtagtgacacatggctatcagaacacactgaagaatccacaccgcggccgagagcagtggctcacgcctgtagtcccagcacttttggaggctgaggcaggcagatcacttgaggacaggtgttcgagaccagcctgaccaacatggtgaaaccccatctctactaaaaatacaaaaaatttagccgggcctggtggctcatgcctgtagtcctggctgttcgggaggctgaggcaggagaattgcctgaacctgggagacacaagttgcagtgagctgagatcgcaccactgcactccagcctgggagatagagtgaggctccatctaaaaacaaaacaaaacaaaaagaatccacactgcttccccgcttcactttacccagaaaaggaatgttctaggccacttcctcttcagcacacatccccagggaactaaaataggttcacagtcacccccatcttcctcattcccatcacctcttacccacagaggcatctctggtcctacagatccagccctgccttcaagaggcacaggtccaacccatccagtgtccctgctagtcacacacagcactcagggtacaatggagggcttctgtgctttggatgggaacaaaccccacctcacattcccacacctgagaagccaccagggtcctctctgtcctgtcctcacactcaatgtctgtcctgggtcacccttgtcatctctcctggaaataggcatggctcctgacaggtaggattgaggctttgtcttttcaggagtccctcccactctgagcacatgaaactgctcagctccatgcaaccctctctcaccaggggccttgttctctgggtccctgaatacctgggtccatgccatgtacattttaagaaaaatgacagtgactctcaccctgacatcctcacccaaggcacgtgtctgacaagaatcaccaggtgagatacctgtggctccacacacctgaggcttcactgcgcaggggtgtcctcatccctctcctcccacccctagggacagtaagcaccacaggctgccttggaccaccagctccccctcccagacacagcctcagatctatactgacatgctacatggagaggctctgatgaacagcaggtattaggaaatcccaccgaaccaggtgccacttgcggccccactcctcctcatatctgtgactgggacagacacacataacacacctctgttcaccgcccagcccccaaggtcaatcacagtctgcttctcccctagatccactgctccccatgtcttccgtcctcagctgcatcctgggtggcctccttgctgttcttgtaccccagaggcaggttccaacctttgtgatgttgcctgcaatgcccaaactttcccttccccttccccttcccttttcccctcccccttcccctccccttcccctccccacccctatcccttcgtcttcccttgtcttcccttcccttccctataaagccaaacatacccatccacctaccttgtggtcaaagtcatcagcctcctgctccactcagtgttctctgaccctgcatatggaggtggtggcccctcctagaacacccaccactcactgtcagccttgcgtggtaatcacagattttgcaggggttacctgtgttcaggtgtgtcacctgtggaaccagaactcttggaaggactggcagagggagctgcttaggatatctcagggctcctggcatctggtctaccacagggctattaacaacagcacttagggacaaggtggaggatggacggttaagagggtaaatatggatgatgtgtgggcaaagaataggacacaggaacacatgcagtactcaaataattatgccaagaaaggtgaggacatggagatggacattcccatatacttctgatgggactgcagtttagtccctacagcaacattgacctcatcatgtttaacgcgcacacgctctgaccactatcctacttctgaaggcctccctgtgctgtgagctctgagaaggccaagcttgcctgttctgtctctgctaaagccagagaccagccaatagcccagcacagggtacttcataaatacatgttgaaggaatgagctccaggaacagtactccacatggtagagatgtgtgtatgaggatgttcactgcagaaggtcatgtcaatgtgacaagtgacgagcagcctcaaatccagcaacaggggtgtgggtaaaagatcatagtgtagccatgcaatggaaccaatgaaaaaaccacaattagagcaaatccacatgtattaataaaggaggtgccctccatacatgctgcacctaacagaatgttgccaaataagaatgaaaaatgatgatatttgggctgtaaaaactagaagtcagctaaataagaatgcatcgaaagtatttgtgaatgcttacaattttataatgccttggcatccgttttggatggaagttggactttctcataccagaagcagggctcagtcacctttgaaatagtttccagttctccacctccttccagttcctcagtgtgattgatcagatatctgatttatacaactgcctcctggtgacctcctccctatgggacttccggatacagcccgtatgactgccccactgaccccacaccctgcctgctgcagtgaccacctctaattacctggatctcatgtctgcttgcattaaatccaccaattaaaactccctgaggacaatctgtttgaataatattctgtaccctaataaaggccttgacccatgggttccccctctgtcctccccatactgcccctgacctctgtgtgtgtgtgtgggtgtgggtgtatgtgtgtgtgtgtgtgtgtgtcctccagacagggcctgtatcccccaggacctgtaagtaataaatctttattttcatcttatgtctctcgcaatcattggcaagagctctgcatcttaaagatcgcaaatttaagaaattggtgtagtcggcacaatagagtacctcttctgtttagcacaagatatctcggagctgctgaggcttttaacatcctcgccggtgtggctgcctcactggtgaggccgttctgttcagtgcaattcagttgctccactgtgtgctgctgtgttgctgctgtagagtgctgccatgttgttctccccaaattgttaccgagtaggaacctgtaatgtgctcccaaggtggtctaccccatgagaagggggattctccatctagggcaagggctaggtgtgtttctggaatcctaatagggaaggcatccacagagggtgaactccactcctccttagagtgaggagtgacatttcccatttattttccccatggaggtgccatgtattgactttttctttcactgtcccaaggttgagccaaggtgagctatggagaccagggcaagataccatttctgttagcaaagcaaatgggtgacaacgtgtggagaagctgtggttctcctgatggatatagcagagtgccatttagtaaaatcttgtcaggaggctgcccctggttagaccggcagtgtctgtagtcactaaggtggatgcgaattttaggccctgggccatggataatccctgcagacacagccgtggcttcatgtgatggggcaatcccgggctagtggctcccttgtttctgcatttcttgctgtggttgcacaatcaacacctcaggggttgattgggtcaccttggaaagagaaacagctgcctaggaggctggtgcacatggaggccaccctcaattttattctgctaacaagttgtaagattaaaacaacagggggctttgggtaccatcaggaacttgtcaagtaaacatccaaagacagaaagaagaaaaagaaaaagacattaaccgtctagaaatacaagccattttaaagattttgcttaaaagatgcgcttgggctgggagcggtggctcacacctgtaatcccagcactttgggaggccaaggtgggtggatcgactgaggtcaggagttcaagaccagcctgaccaacatggtgaaacctcgcctctactaaaaatacaaaaaattagcagggcatggtggcaggtgcctgtaatcccagctacttgggtggagaatcgcttgaacccgggaggcagagacggcagtgagccaagatcgcaccactgtactccagtctgggcgacagagtgagacttcatctcaaaaaaaaaaaaaaaaaaaaaaaaaagacgggcttgtttcgtcgttgtggagtcatcccagagagaggctactccctagagtcactgaccacctttcctcctccatcttttcctcttatcattctagagacagaaaacaagaatctcagctttaggtggctaacctcaccccccaagaaaagaaactaccactttgattgactacaaatccaagaaaaataaaagagaaactttaaaaagtactgagcaaaccacaggtctagcaaacataatgctagccctaggttacttattcatttacaacaaacccctagatataggaggaaaaaataaaaggtaattaaatatatacacatacaatattttaatataaatatataataaatagttaaattatgtatgtataatatgtaactaaatcaaagtaaaatttcatactttgattctattggaaattcaaaattcatttattaacttatatattaaggaatttatgtaaaaaaagatttttaaaagggcaccaatttgcttttgtgtctctacaacataggatctaatttaactttacatttgctaaatacactaattgacaaatattcatggatttaatcaatactggggctcaaattgtagccacacgtgggaatcccataaatttaaacactctgtccctattatcttgagaagaaaactaaatataaaattgaaaaaaacaggtatgtctcaatttacctgtaactttgcctaaatttcccggagtcatatacccattgctgtaaaacattctctattggacataggtgctctgagacaataaataaaatagaagtgtttttggtacttagacattggcttgacaaaatgggatcccatgaaacctcagttaagatagtgaatacggcccaatgtgagttgaaatggggcctttaaggattaaaacttattacatgaaacctagtaagtaatggggtgattatccatactgcttctccatttcatagcccaattttgacagttgtcaaatctggaaaaaacaaacaaacaaacaaaaaaacccctgggaatctgttgcctcacagagacacaaagtagacatcaaaattgtatatctcagttccagttccaaaatggtggcatagaagcaagctggctttactccttcacacagaaaaccaaaaacaaatatacagcaccaaaattattaccagatatattccagaactcaaatatgaaaatgaaacagttttcagagccacagagaagtgaaaaaaactcccgacagatgacaaaagaatcagatttccccatctgtaatgtccctccctgccccattctgcctggtaccaggtgtgtggaaaattttaccccaactcatggtttctacactgggaaatgtaagatcaatgcgggcaaccagtttctgcacaatcctgggttccctgtccctgccttaacccacaagaagcattgtgagtgcccgaagggagaaatttccctgaggacagtcaaagagtggggaggcaggactaccatctccttccctggaaactctgctgtgtaactcagccaagggagacatgaaatcagactggtgtttcagcagctccatgttgtagtaggtttgtttcacaggtatcctgggcatggacatctagccagctttcccacactgccaggatatcccctttgggacctccctcagttaggaagggcacactctgatcatttactagggccaaggtaaaccctaaaggtaacttagagatgaaaaggaggtagtgacctagcagtaaagaactctaagaaaatctatccaataaaaatcaaaacaagccagacaaagactaaaataaataatgaatccttcaatgtaaagacctggacttacatccacaagaaacagtaagcaggtaaccatgatctccccacatggacaaagtgaggaacaagtgactgatcctgatgagatggtgatgtgtgagctctctaatcaagaattcaaaactgcagttttaaggaaactcaatgatcttcaagaaaacatggaaaagcagttcagaaatttatcagagaaatttaacgaagggattgaaataatttaaagaaaacaaacaggaatcttggaattgagaaatatatttgctgaacaggaaaatttattagagtctctcaacagcagaatggatcagaggaaagaatcaacccaaataagactcccccaaggcataaaataatcgaattctcaaaagtcaagggcaaagagaagattttaaaacagaaagagaaaagaagcaaatggcataaagaagctccaattctgtggcaacagattttcagtggaaatcatacagaccaggagggagtgacatgacattctcaaaatgctgaaaaaatattgacatttgagaatactttatccagtgaagttatccttcaatataaaggagagagaaagtttcctagacaaacaaaagctgagataattcacaccatcagactagtcttcctgtaaatactaaagggtaaatactaaatacttcaatgtgaaagtaaaaaaaaaaacactaacatgcaaaacaaccacaacaacaataacaacatttgaaggtataaaatccactggtgaaattaagtacgtagacaaacccagaatactcaaatagtaattgtggaaagtaatccaatcataactctagcatgagtctcaaaatataaatctatcaaaaacaataatacattttaggaggccaaggttggcagattccttgaggtcaagagttcaagaccagcctggtcaaaatggtgaaaccccatctctaccaaaaaatacaaaaatttgcagggtatggtagcacatgcctgtcgtttcagctatttgggaggctgaggcaggagaattgcttgaacccaggaggtggaggttgcagtgagctgagattgcactactgcactccagcctgggtgacagagggagactctgtcttaaaaaaaaatagctacctgtttggagaaaggtaatataaaatatgtaaatagagacaaagtcaaaatttgcaaaggatgaaattaaagagtagagtttttttggggggttttctgtttctattattttatttgtgatctaagataagttgttaccttttcttctcttgaagatactttgttatatctatgtttttggaagtcttatggtaactgcaacgcaaaaaatctatgatagatccactgaaaataaaaaacaatgacttaaaacatactaccagagacaatcaaccacaaggaagacagtaaaaaatgaagaaaggaagaggggagttacaaaacaaccagaaaacaggcaacaaagtggcagtagtaagttcttacttaaaaatattgaacactgaatataaatggactctattctccaattaaaaggcatagagtggctgaatgctgcctatatgctgcctacaagaaaccacttcatgtaaaaagatacaaatagactgaaagtgaagggggtggaaaaagatatttcatgcaagtggaaaccaaaagagagcaggagtagctatactgatatgagataaactacaaatcaaagactataaaaagagacaaagaaagtcactatgtaatgataaagcgctcagttcagcaagaggagatgccaattataaatatctatgcatccaacacttgagctcccaagtctcccaagtatttaaagcaaacaatagtggatctaaaaggagagatagactgaatacaatattaattaggggactttaacaccctgctctcagcaatggccagatctttcagacagaaaatcaacaaggaaacttcaaagttaaactacacactagatcaaataggcctaactggcatttacgggacatttcactaactatctaactgttacagaattcacattattttcatcagcacatagaacattcttcagaacagaccacatcttaagtcccaaaaccagtcagaataaattcaaaaaagtttatatcacatcaagcatttgttctgaccacaatggaataaaactacaataaatgaataactttctggacacatacaacctaccaagatggaagcatgaaaaggcagaaaaacccaacaaaccaacatgaaactgtaacaaaaggaaaacccaggaccgaatgacttcactgctgaattctaccaaacatttaataagaactaaaaccaattctactcaaaatgctttaaaaaattgaagaggatggaacactttcaaactcattctacaaggtcagcattatcctgataccaaaaccagacaaggacaggacaaaaacaaacaaacaaacaaacaaacaaacaaacaaaaaaacactacaggattgcttgaggccaggagtttgagatcagcctgggcaacatagtcagaaccaatctcttaaaaaaaaaaaaaaagaaaaaaattagccaggcatggtggcatgtgcctttagtcctagctactcgggaggctgaggtgagaggaccaattgagcccaggaggttgaggccgcagtgagccatgtttgtgtcactgtactccagcctggggaacagagcaagatgctctctcaaaaacaaaaagcaagctgggtgtggtggctcctgcctgtaatcacagcactttggaaggctgaggtgggagaactgcttaagcccaggagttcaagaccagtctggacaacatagggggactccatctctcaaaaacaaccaaccaaaacaaagccaaaaaagaacataggccaacatcactaacaaacatagatgtaaaagtcctcaataaaatattaacaaaccatgtttagaaacacatcaaaagagatcattcactatgattaagtgagattcatcccagggatgccagtatggctcaacatatgcaaatcaataaatgtgatccatcacattaaagagaaccaagaacaaaaaccatataatcactccagcaagtgcagaaaaggcatttaataaaagaatgggttgagggagtggagcccatagtcagagcagcagtggtctgggattttggaagtagaaagaagggcagcaccactggccaggaccaccagggaacacccccataggccctgggtgttgtgctccagggagggttccctctggagttattaatcttggtgtccactttgcccagctgcccctcacagggtcagggaggatgaagggaaagcttccttctaatgaaagttcagggactcacagttcctagagcctgtagggagaggaagatcttcgaggaagagcacctgggcattggggcgtttgagaggaagatctatgccaggtccaagtggacaacctgtggactctctctccagggacatacgggtatctgggaatctcctgtagcttaaagaggtaaagacctctccctttagcctgaggactggaggatgctggttcaggtgaatgagtcctgcaggggctggtacaggcctggagggtggtggtgtccagggccttgggttcacccttagcatgattcaggccgggcggtgtttcacatgagcaagagggcctgggttcattgcttcaggacaatggtgaaatctcatggtggaagaaatcttgtccttgccagtgcccagctttcatttggtcttggcccagagtgtcctccctagagaagactcttgtcccttcttcacactgcccttcagggatatgccagccttatgggataagatggggtggagactgtagatgtgggtgggaatctctccacagagtgctccttctctcagcggttgcaccttgtctcagggcttcagcttgaaatctgggatctccaagcccttccctccccagtcctggccaggaccacatgggcagatgcattgtgtgaagtgcatttcatttggggtgtcctctctgcatggcaccctcccgttgattctctttgcgcatgtcagagtgcaggcaccatccacacctcctgctggaggagggacggagctgttgactcctgagagctgatcatgtgttcccaccctcacacacaatcatggtccatcctctgagggacatgtgttgccaccactgtggagatggtgcaactgacagtaacaaacagtaaaatctggtactgaatgggaccttaagccaacaatgacaatgtcattccaaggtgtttcatttttattgattcaatgcaagtcacctgatttcattgactattcacaatagctcgataaagtaaatgcatcatcaccaccactttaaagaggaaaaaggtgcttgggcagtttgtgactactgtggtggctgctgcattgctctctggtaaagccaagtaggtggtgggtgcggcctctgggctgggatgatccaccctcctggtggtggcaggggagccaagctggagccatggcctgtgcagtggtagcagctgaactgaccgctgctgcaggatttgcaagctgttacattttgcgaagccatgaagcacataaaacctcaagtagaacaagtgtttcaaagtctaccaaaatctgccttcagagattattactacagaggtggatatgaacccaaaatgacaaaacgggaagcagcattaatactagataatgaatgaacactagtaatagtagggtaagccctactgccaataaagaaaaaaataagagatgctcattaacatgttatgctcttaaatcacgcagacaaaagagggtctccttatatagtagccacaatcaatgaagctaaagatttactgcaagatcaagctaaaaacagtaggtgtataatgaatttttaacttcatattagtttatgtatatgaatatcaagtttttataataaaatgcctccaaacaaagaatatttgatttagggtttaataacttctaagaggggactcagatgtttcctgtttcacagtcagtctgagagggtcatttttcctggagctgacctgggtggaggcctcacactgatactccccagcatcctctctcctgatggggtttatgctgagcatacagtggccctgggacagctccattctctccatgagtcacagacgctggtcatggaagatccactggataaggttccagagtcatctgtggggcaggtcaggatcacaacatccttttcttctgtgactctggtgttgctgactcagatggggtcggagccactgaccctgtggacaatcagtggaggtgctcaactgaaagtgggctgagggcacgtcttctcctccatccctgggtccttaaggtaactgtggaccccagaccaactgacacaggagctagaaagaaattatttaggaagttagtgagggtaagagcgtccttggcaaggtttcccctttaacaaaaagcagcccaagataattccttttctaacaaagagcagcctgaaaaattgagctacagatgtagatgagcaagatggaagcttgcacaggtgaattccagtaggtgtgccaatagaaaagggctgcctggaagccaggtatgttcaacatggagactccatcctcccttttctccattaccacatgtacagtaaaaaaccaggcaacatggcaccggccaggtagacaatccatctgcatgacaaaagatcagagtggggcagccagcaaatggcacagctggtctaaacaatctttcaccccctgtataaatcagacactgcctcctgaagctcatctataaaaccttctgcatttcactatggaagtggcaacccattttccccaggacccctctctctgtgcagagagctcttctctttctttcccctatgaaacttccactcttaacttcactctgggtgcctgcatcctagttttccatggccatgggacaatgaacctcgagtattaccccagatgaatgatgctgtttcacaatcactggttcagctcccttcttcttagggtttcacagctcggtggggagaataccacgcctcagtggtctggggagtgaggaacaaatgaagaattaatcagattttacttagaacgctatcacctgcctcaaccatcagatccatgttgggaatgtccaggcctcctctcttagatctatacccacttcactggacctgaaatcctgtgtttcccgatgtgttggtgtcactcctatgagaggataaaggagagaactttgctttctctccccactcacaccctgcacaagacagggcccaatatgagacacacactcgctcagtagttctctcatgaaggagggagggagtgacctcgagtgattctgccatctgtagtctgtgtaccctggccagtggctgtatcttcatatgcctcagtttcccctcagtaaaataggacacacaatgagaactaaaaataaaattctaattccccagtgaactgaaaggatggcctcttggccaagcggatcccagagttcctgatcatgacaggatgggaggttacacctcattacagcccctccctttggaagtttagaggtgacaactgactagcattaacgctaaaatcgagatcatgagactgacagaacagactctctgtggccataagataccaaattataaactcaacctaaggtcatgcaggcaagggctaagccacactttcctacatttaaagaataagctatgttctaacacagaattttctttctctctagcggctaaagtaacactagccttcgagataagcaatattgaaatgatcgcggctcatccaccaacactggctaactgacccctgttccaacagccacaactacacttcaattggacaggagactgatttcagtaactttctcctaataagagaccactgagcatggcctggttctgctggtatacagacacggtgcactgagtaccataatgcttgtttcatcttttgatgtataagacctaatttaatacatttaaatctgaattctccaccccaaagtgaacatggggtgcatgtagcatgcatgtttgttgatcacgcatgtgcgtgtacttcctttgtgagtatccatagctccacctataacctgttgaatatgtatacctggccaactcattcagcataaatctatcttccacattcccctcccttgaagtgcctgctattggtctctgctggaggctgcatcttctaccctggggaatggccagcctgcaggctgtaaccctgtgtaagaaataacctggttgggtgcagtggctcacacctgtaatcccagtggtttgggaggttgaagtggtagaatagtttgagctcaggagccagagactagcctgggcagcatagcaagatcctgtctcttaaaaaaattttagggaggagagtgaggatcagaaaaaatacctattggctattatgcttagtacttggatcatgaaataatctgtataccaaacccctgattacatatataacaaacctgcatgcgtatctttgaacctaagataaaagtttgttttaaaaactatctgggtgcagtggtgcatgcctatagttccagctactcgagactgaggtgtgaggagtgcttgagctcgggggattgaggctgcagtgaattatggtcccacctgtgagtagccacttcactcaaacctgggagacagagcaagaaccggtctctaaaaaaaaataaaaatagaaaaataaaatgaaaaatatatgaaataaagtctcctttccaaacgtacagatctccgatttttctgccaacaatgataaatggtcagtggcttgccatgttgtctgtgaattacttttaaaatattcacgatcacctgacctaaaggttggtaccaaggaaccgcctgaatacaccgtctctgattatttgcctccaacagagtgttccctgggcctgatctctggtggacaatgagctgctgggaacatcctctcttctctattcctcccctggggatgctgaccttcccttggagtctcctaagttccccagggcagtcggctaatgtcctagggagcttacctgtcttctccataccaagtctcatgtgaaggacgaggctttgcccttgcccagatgaggctctgggggctgagccctggctggctaccagctgcaagagccatggcccttggacagctggtaaatccttgttcccagtcagccctgcccaagatgcctcaacccagccccggcacaggcttcccagggtcacatggagtcaggatcctgggacaggggactggacaggggtttccagggctgagtttctgaacaggggcttcccaggggtcccctcactccaggatctgacatggtcctacaaggaacgtccatggggaggggacccaggagggggaactgacactgacctccccttactgagcctccccccaaccccatcagactgtccttcctctgtagcaagtgcctgcagggtctggatgcaggaaagaaattctgatctgtggaagtttgtctcccctgtgtgtgtcttgcactaaatgtccaaacccccaaatgggatgtaatgtagagggggacacaggcacagcccaggcctgaaaatcctgtgtgtgtgaagcagaactgacccccaacacccagagctcatgagacatcactgtgtacgtgaaactggccagttacttcttcattcacaagatctgtttttatgacttgtagggtgtaggatcctgtgtcattgttggtgacattctgtatcagcagacatgtattggggtatattgtctctcagcctctgtggcaggtcctggggtaattacttgagttcctagtacatatcctgtaattcccctttgtaccagttgtagccaagcctaaggcagattgtgggtgagtggaagaatctccttgccttctgcagcttcaacagtgacttgggcagtggtaggcaagttccagaaagttaaaagtgaggctaggagtggggagagagcatcagttaatactgggccctatgcattgaggtggaaagatggggccctaggtcctggacaggtctcttcatccctcagccttggagtgtgtgtgtgtgtgtgtgtgtgtgtgtgtgtgtgtgtgtgcgcgcgcgcgcgtgcgtgcgtgtcctactgggccaaggtcagcagcatgacctcccttccttcagtgcctctgaccttggcatttccctgtttggagtccttttccccaggggtctgcctggctccctccctactgccttcaggtcctgctcacattagggcatccttgggagaccccttccctgacacctctagagaccctgggtcttccctttctgacctttcgctgctgtgttccctccagggctcttgtcaatacttgacctcacattctagatacccttgcatgtctgtcttcctccctatgagagcatgagctctgtgagaacagggacttgtgtgatcttggttgcaccccagtgcctgggacaggctgcggactcctgtggatgagctcatgagtgttcccagggcccttcacaacgtgggatttattttccaatggctgaggttgttggctaagagctctgttggagttcaatcaggctggtgggaaaaatattagagatagttatagagatagacacaaatcttcttggaagaccaaaaagtttgcataactttggtaatagatctgactgaaggtggtccctttacctttagttaaacaaattaaagtagtaacaaaggaaggcagagtagtttgtctagccagcttgtttactcatgtgatcttaagactaaccattgatgtgccacaggtgcttaattgctttctacttgggaagtccacaatgtcaattaccctctaacggtgttgactcaagcctttgttaattaatcttactgaataaatatgagtctcactagctgatcaaggccatggtcacaactgtttataggactcagcagggagtctgtaagcggccctgacagactcagctggactggcaaagcaaaatatgtgtgtgtcagtgtacactattcacccgtcccccacagctggtgcccctatatgaggagtgctgccacagagctctgtttagtgtcccttgttttttttcttgagtattaccccaacttaaattgtgattattgtcatctgttttcaacattaactgctcagtgatgattcacttggaaaacattaacaatcgagattgtttcttcactaacaacctcagattatttagattttcctgttgtaatcccttcttcctgtttagtgtccaacagaagccctctgtccctctcaggtccccgttctctccaagaaaccccagccagtctctgtgctccctcctcccatccactcccagggagccctcccctcacctgtgagcagaagcgcctgccagggatgtgcactctgtgaggaggggctgagggaggccccatgggctctgctgtctgctttgtcctcctctgtggagaggagcttgggcttcagaaaataaggaggccagaaagtaaggaacaggctgagaaataatggggatgtgtcgaaaggtcacagatgccaacatctttgtcctatgcaatattatccataaaattacaggtttgagatatgcttaaattttcttctaacatgcattaaaataaacatataacttttaatagttatattaaattgtatttaatataaattaaatgctcttgtcagagctactgtgactgtcagctctgctgtccttcctctctctgtgctaagcctcctcccagggcagaagcacttcccagggccaggggtgggggcggggaaaggtaagtggcaatgaggatctgcacaggtagcctttccgcctcctcccctctcagtcctgcctccttgtcttcttttcctctttttctccaatctacatttcagttccttagaccacgctgtgagaagcaaggcttattgggacccccatcccttaacaggatgacctgtgctccccataagtgacctctgctgtgtctagggattggctctgtcagcacctcacagagagtccctggggcccccaaactcagtgttattttctctatgacacagaaacccctctgggtatgcaaggttttcctcatgttttctaatgtctgggaaggttggatttactcccagcagggaggtcacagagatgtccagggagtggggtcctagaaatggacaaatctagagctaaagcccaggtctacgattttcagttgtttttttctgcagtgctatgtgaccctaatttcctaggagtaactaaaatgcaaacctcagacatttgtagacattttatgatttttctctacagcttgtaccactgttattattatttgctttatgctttttcctaaataaatttactttacaaaacatccttgtcctagtagggtgcaggggctcacgtctgtgatctcagctgcttgagaggttgaggtgggtggattgcttgaggacgggaatttgagacaaaacatctttgtcctatgcaatattatccataaaattacaggtttgagatatgcttaaattttcttctaacatgtattaaaataaacatataacttttaatcatcatattaaattgtatttaatataaatttatatacaatacatttttatataataaattatatatataaatgtatatataatagtttttcttttttgagatggagtctggctctgtctcccaggctggagtgcagtggcacgatctcagctcactgcagcctccgccttctgggttcaaacgattctcctacctcagcctcccgagtagctgggattacaggcgcctgccgccacgcccagctaatttttgtacttttttagtagagatggggtttcgccatgttggccaggctggtctcaaacacctgacttcaggtgatatgccgcctcggcctcccaaagtgctgggattacaggcatgagccaccatgcctggcctatatattttatataattatataaagttttctataataaattttatataataatatataaaatggatatttatttaagataaagttattagttttatatatttacatatatttaggaataaatgtgttactgtgggagcccagtgcccaggcaggtagtcagtacatgatggttgtcattagggttaatactttggaattctggattttttcccaagagagtgtctacgctggaatattgggcttgtggctttctgctgatgtgcatgtgtgaagaagctacttccacttattaggacttgtgtatctgtctcgcagtttcactacctattttctcgtgatgttggtcaagtcgcctaacttttctgtgcctcatttacctaatttgtagaatatgggtaacagtacacaagtgtgagtgtgtatttcccaggactgaccactagagggcgtgaaggcaccggcacttactattacagcaatgggtgtagtagtgctcatggtcgtaaacatcattctcccatgaaaggaaccagggcttcctgggagaaataactgattccagggctggggccggaaagcacaagcggagcctggagcatctcgtgaggccagaaagtaaggagccggctgaaaaataatggagatctgtcgaaaggtcacagatgccaaccagaaggagctttgaatgaccaattttgagacaaaatgagcactataagaaataatgatagtaataaattccaacccataaatacccatgagttcctactaatataaataaataattgaatacataaatatataaggatgaagaaacagctttttcttacagcagaattccaattaatgaatgtagaaggaatgatcaaatagaaaatcactatttggctaacagcacagtcaattgtttgtaggcaagaattatcaatggactttaaatatgaatgggtaaaagtatgatgatgctacaactagtgagtaccaagggggaaaaaaaagtacgttgagaagaaacaggctacttccatattcccaaagtatcacttcaggagctacttattgattataatgggacaaatagtaacttacagtagagaaacctggcaacagagtctctccgaggtacaaaggctctcttcaggaaggaggtaaggggaaggaagaagaaaacactgtcctgcctcaattatttgctttccccattctcaagtgtacttcatagacattcaaagatatgtgttgatagtgtccacgatccacatggctctattatagtcatttattcacacatacattcagtgaggctttgagtgcctaatgtgtgcctgatatttgctagatggtggatgctgagaagatcaggtgtgctgctgtctctagggtgactgaatccacctgccccactttacagatgtggaaattaaagtgaaaaggatttataggattagttcactgtcacaaggtcactagccttaaagttacaggagtaaagcaagtttcctgacttgctagattttctgctgcaggtgctgacaatggtgagctccaataggagagaggacactcagagtgaagtgggagccctgaacaccctggattagccaagaggacatgccgggtccagctgtgaccgcacaaaggaccattggggatatttgtattctctttttcacttagagcttgaaatgaggaaaactaagtgcagaaaaccaagagtggaagatttttcacaaagcactggtaacatgcatcagaaaaccctgtgctgatgtctgtcacggtgtttctcactgaacggtaatagtctggctttgagtgtgttccctctacagcctggagttctgcgaggcagggaccaggtgtgattcatctttgtctctccagtgacagtacacagcaggctctgataaatatttcttacaaaataaaatggaataaaaagtagacatctgcacaggtgtgggatgactgagcagcagcagaagcaggaaaagtcagcgtccccagatcagctgatgtggtgttcggattctagataggggtgaggtgccaggatggggatgggggtcctgtggctctgctgccctgggggacacccctaggtttcacagtgcctgctgtggttgctgcactttgcttccccatgggaaagtgatcagagggtgtggggcttcaggtgaccccatgtgggaaatggccaagggaaggtggggtgggcggcacatggttttttttaaccaatatttgaaggtaggttgtatgaaaaggtgttaggcttatttcagcttatggggagtaggacagggattggtgagtgtgtatcaggtatattttggctcaggatggaaaagaactgtcacagtaacataaggtcttttgggaaattacatgtttactggcagagttcaggccagggctgggtgtctgaaaatacctgtcagggtcacttttatggttacaagggcagagcttggcttggaaccaggtttcttactaataccacatattaagtattataaaaactgtcctttgcaataggacattgctctatgatgcaggttgaggtccctctgtttaagtaattgtgggtggctgtgattctctcatctagtctgcgacttggacttcacctccatctgcagtccctctcctttgctgttgacactggtcagagttaagcgcatttactgacgatggtcacagggtggcagcactgcctctctggtattttctaaaacctcttcctggaactgagccagtctaagaggatgtcatgactaagaaaagggcactaatgaggtgaacagataattttttttttcttgtttctcctgtgaagtaacagagtggaggtgagcatggaataattgccttttagaaatggaagacaatggagagaagtgtttcgcaaaccttaatgtgttcacagatcccacacagatctttttattcaatacagattctgatttttctggtgaggcctgagattgtgcatgtctaaggagcttttggatgatgccattgctgctggttggcggaccacactttgagtagcaaggctcgaagatcatttagaggttaattctcactgcatctaatttatggatgaaaacaaaccaaggtccagagagagcatatacagcttgcctaacaaagccattccctaagtgcctgacttcttgcatttaaacccagggcttcagcctttgtccagttctcactccacacatcacacggtttgttcactgttgtgaacgacagttgtggcagcatctctttagtttaggaatccagagccccaatttcactaccctctttggtcttggctcatgctgtgacttcgaatagttttgcccttacttaaaatcttcagtggctcttttgtaatcacaagatcaagttcgaatatctctgtctagtgttcatggctttataacatatggtatctctttagtaaccttacctaacttccctgttttaaaattgtctcttgctgccatagccctccttgctccttcctgctccctaacaaactgtgttcacttctctctcagtggtagtgatgatggcatggcctctgatgttagactcatgtaacttctaatcccagatccaccaccaacattggcaagttgattcatctttctgaggataagcatcctcctctgaaataaacttagatggcggttgagaggggtaaataaaataacacacaaacccactctcatccctgagaccctcttcaaaactagcatataaaaatagctatttgaagaggttcagtgaaattcaaggtaacacagagaaggaattcagaatcctatcagataaatttaatagactgaaataatttttaaaaatcaggcagaaattctgtagctgaaaaattcaattgacaaaccgaagaatgcactaaatctttcaacagcagaattgatcaagcagaagaaagaatttgtgagcttgaagagataatatatgaaaactcagagtcagagagacaaaagaaaaaagaattaaaagaataatgcatgcctacaaggtttgattattaagctactcaaagagatacaagagaagggtgaaaaccaacataaagaaatgtaaaaaacaatcagaatataaatgaaaaattttctaaaatgctagctagtttttttttgagacaggctcttactctcatcacccatgctggagtgaagtggcacagtcatggctcactgcaggctcaacttcctgggctcagatgattctcccacattagccttccaagtagctaggactaaaggcgtgtgccaccaggccaggctaattttttgtatttttagtagagatggggttttgccatcttacccagggctggtcttgaactcctgggctcaagtgatccaggagattcactgccaaaaaggatataaccaagtcatatagtcataggttatctaaagtcaatgtgaaggcaagaattctaagagcagtgagacaaaagcatcaattaacttataaaggaaaacctatcagtctaacaccagatttctcatcagaaaccttacaaaccagaaggtattggggtcctaatcttttggcttcttaaacagaatagctctcagccaagaatcttgtgtagagtgaaattatatttcaaaatgaaagagagaaatacagtctttttcaggcaagcaaatgcttcaggatttgtcacggctagaccatcctacatggaatgttaaagggacttctaaatcacaaaacaaaagatttaaatagaacagaatagaacctcttgaaaccaaaaaattcaaatggcctataaaacaataacacaataagaaaacaaagtagataacgatcaacatgatgactggaacaaatattaacattgaatgtaaatgacctaacactccacttaaaagacacagattggcaagataaataaaaaatcacaaaccaaatatcagctgtcttcaagagactcacttaacatgtaaggattcttatagactcaaggtaaagagatgataaaagatattccatgcaaatggaaaccataagtgagaaggaatagctatccttatatcatataaaacagactttaagcaacaacagtaagaaaaagacaaataaggcaactatataatgataaaaggatcaatcaaacaagaagatattacaatcctaaatatatatgcacctaactttggagctcccacattcataaaacggttatgatgagacctaagaaaaaagatcaacacaaaacagtgagggtgtcctgggttttctttttattggacagcagtgtactagcctatcactttcccagtcaggggatttttggtctccccattcccctaccatgggttcatgccaaagtccatattttttattagtgtttggaattggattttttttttttgaggtggagtctcgctctgttgcctaggctggagtgtagtggcacgatctcggctcactaacctctgcctcctgggttcaagcaattcttctgcctcagcctcctgagtacctgggactacaggtgcatgccaccacacccagctaatttttgtatttttagtagaaacgagatttcaccatattgtccaggcttgtatagaactcctgacctcatgtgacagggaaacaggcactcagtgaacttcatgcgattgaggagttaatgataatgagagaagggctgtgaggggacagcactggggacaccagagcctgtgacgggctgagttgctgtgccttgggagatgcccttttgactgagccctgggaaggagggggtgtgggggcaggagctgcctgcagagggagtggcctcaggtgggcggccacctggctgcagggaagaggtgacagagttcgtgtgcagagcttggagggtgaggaggaggtgggttgaggtgaccttggtgagggtgaaccatggggggctgtgggccctgctgagggaggccagccagccctggacctacagggtggtttggtcttttttgtcccattcccagcatccactgagtggtgaaactctgcaggccagggaccatcccactggccagaaggagcgcacagtaggtgcccactcagtgcatgttgggctggacagaacctcactctgccccctgcccccagctttgggagctgcagcaaggtccctccccctagggatctccatgcctctgtctctgaggggtgagatggggagacttcaaagggccatctcagagtgtgggggatagagacgcagaagtgtgggggatagagggaggcctgggctctagacccaaaggaccttacacacctcctgagtcttttcaaatggtttcttctgttactttaaaaatgatgtaagtcatcatatttattgtaaatcccaggaatctaatcatgcgtaaaataaggtgtcttatccttgaccccaccccttccccaattaaatttccaggatgttaccactgtttgcagttggtgtgaatctctctttaataatactctgtttatctcacttgtcgttttacgccaaaatacccattgaattatattattgctgaagaccattcttttttttttttttttttttgagatggattcttgctctgttgcccaggctggagtgcaatggtgtgatctcggctcactgcaacctctgcctcctgggttcaagtgattctcctgcctcagcctcctgagtttctgggattacaggtgcacaccaccacacctggctaatttttgtatttttagtaaagacagggtttcaccatgttggtcaggctggtctcgaactcctgacctcatgatccaccctccttggcctcccaaaatgctgggattacaggcatgagccaccacacctgcccagaccattctgttctactgaatcatgtgtggtgggcacctcttatatcaatacatatggattttatcttgtgtttgttattggctcccctttttctcattgcatggctacactcaatgctttgtccacacccctgttcctgggttggaatcttgtgacagaaaatgaagtaacaaaggctaaagctttctaaagtggagtcaggagattgcaagacaattgcactttcaccagcaagagctcaaaccacagaatgttccaatagatttggataaacagctgaagtcagtattcaccagccttcaacatctcaactaggagaaccctaaaattaactaagcacatagaatggaatggacttgtgatttaggattccttctcagccaatgagctgcttctgaaaacaactttttgtggaaattacctgtaaagaaaaccctctcctgtgcttgtcttacagaacactagtcagggctgccctgattcagtggacccgaattgctattatttgtttcctaaacatatggtattttctgtgaccttcatctcaatcttttttttaagttactgggctgtttcccagttttcataatgacgagacattctgcagtgtttcatacacatgtcttttccccatgtggagtattgatccaggagctcattcagtcaacgcatgtttatgaagcatcctgtgccaggctgtgggctggtcactgtcttcagcagagagaggacaggcacagtcttgccttcacagagctcacagctcagggaggctcttagaagtgggatactggtcggagcatgtgcacattaaacatgatgaggtcaaggttgctatagggactaaaccacagtcccaccaagatcgcattgagttcctgtggtagaccagaggtcagggcccctaagatgtcctgagcagctccctctgctcagaagttttggttccacaggtgacacacctgagcacaggtgacccctgcagaacctgtgattaccacccaaagccaagagtgagtggtgggtgttctaggaggaaccgtcacctccatgggcagggttggggaagactgaggggagcaggtggctgatgactttggccagaaggtagggggatgggcaggtgtgcgctcatagggaagggaagagaagggagggcattgcaggcaacaacacaaaggttggaacctgccttcatggactgagaaaagcagggagtccacccaggctgcagctggggagggaagacatggggagcagtgggtctaggggagaagcagactgcgattgaccttggggactgggcagtgagcagaggtgtgttatgtgtgtctgtccccatcatagatatgaggaggggtgaggccgcgggtggcacctgggtcggtgggatttcatagtgcctgctgttccctagagcctctctgtatagagggtcagaatagatctgaggctgtggtctgggggaaggggctggtggtgcttaccatctctaggggtgggaggagagggatgaggatgcccctgagcagtgaagcctcaaggtgtgtggagccacagttgtctctcattagacatgtgttttgcgtgaggatgccagggcctggtggttattactgttgtcaagtttgcatgacaaggacccaggtatccagggatccagagcacagggcccctggtgaggggatgaggctcagatggggctgaccaggttcatgtggtcagagtgggagggactgatggagagacagagcctcaacccctcctgtcaggagctgtggctatgtccaggagagatgacaaggatgacccaggacattgagtgagtcattgagacattgaaggtgaggacagggcagagaggaccctggtgactgctgaaatgtaggatgtgaggagggctctgacccatgcaagttacaggacctccccacccccgagcccacagatgacccttaaattgggcatcctgagtgctgtgtgtgcccagcagggacactggataggctggacctgagtctctgtaagggcagcgctggtctgtaggaccagagtcttctctgtgggtgtgacgtgggcaggaattagcaagatgggggtgacaaggcttggcttggaggatctggtacagaagcccatgggcttggtcagctcagcttctcaggggctcagctggggctggaggagcaggatgctgtgctcagggcatgctccaggcagcgtgatgtgtgtggttccagggtcaggcacgggggtcaaaaattaaccatgaaaagttcccaccttctgtaggcagagaaaatggcctgattgtcagggtcagggagacttaccatgtggccaaagcaggctctcagcctcccagagaccacaccctgggtgcagcactcagctctgcagggtatggcaatagatgtgccaagaaccccaacatccagatgcatgcaaaaattttgcgatatataaaatagagcagatcaagtttccctgcaataacgttgttcctggttgtgtctttttcttgtaaactagacatggacatctttccagcagtctgttctcatctgccaccttcctgctgcagcacctcagaatgaacattcctgagacactgtccgtggtgctgacgaccaagagctatggaacagagtgtgatgtagaatcttctagttacctctgctctcctttcacttttaacaacagagcatcattaacaatgagaaggtggagaggtgttcaggatcttgaagtgacttctgtcttgctctcccataaccctgaagctgctgtagacattattgcagaaactgacaccacagtcaggatggccttgtccaggagcccatgtgcagtttgtagtgagcaaggatgagaaaatggtcttgaaaggggtgatggacagaacaggggcttttcaaaaatgtcacatcatcacccccagcatccgtgaatctgtcacatggtaagagaccttacagattaaatgaaggattatgagtttggaagattattgtagtttatccagatgggtccaacataatcacagaatcccttccttacaaatgagagagggaggtgggagagtcagagaaggaggaggagatgtggggatagatgcagaagacagagcggtgtcaagatgctgcactgctggctttgaagatggagaaagaggacacagccaaggatgcaggaggcctctaggaggtggaaaaggagaggaaacgcactctgccctggagcctccagaaagaacgcagccatgtgggcaccttggttcaagtttctgtgtcacttagcttgtgggaatttgtcacagcctcaacaggaacctacagaggagtcaccttgtgtgcaggtgggatccagggtcatttacagctaaatcctgatgtaaatattgcaggttgcttttcctacttcctatctcatggccaacaaccctggacaatggcagaacacccttggaaaccacggctctgtgctttagtggagggaccagcttgtttgtgggaaggtagcacctggtccaagtgaacctacatgagatcgttactctccccagggccctcagggaagggctgagaacagctggcccaggtgtgtggaggagctgcaggtgaggcagggctggaggggcctgtgggtccaggtagaggggcagacaggttgtcccatcgccatgggagcctgcacgagctttaggttggggaaccctgctcctctgacctggacgctcctgtgtggagaggaggcttgctcagtgagatccacgccagggggtaaattgggaactgatgggaaatgaggggctagagtcctgggtagtgcctgggaggaccttgctcaaggactgaattcttggtctgttcccaccttggttactctgacaacccctctctgtgtcccacggggataaagatctcctgagcagtggccattgggacagaggagaacctggtggccagagctaagcatccaggatcctggatttggggacaggcaagctcattgctgggggacagtgatagatacggcctccagggcctgggtgaagagagcaggagggctcaggacactggaggctgtgtggaggtcacacccacgatctgtaccacccatggatgctcctgcattgctcacctttgtgtggacatcagatggccccaacttttgcactcctgagacatctcatgcattcacagagggacccaggctggggctgtgcatggccttggtctctagggtagtgtgaggacagctgagcactcagctggctgggcaggactcctgcgaatcctgccctttcctgtgtagggtccaccccagcctgactcctaaccccctactcctgtctttccagggaagagagactggggttgagataaggtggagatatttttcctgtgtgacccaggagagaatggacatggagtttcaggtgagtttctgctaagttcccatgagcagaaaaagagccaatgagaggaagtttcccctttattcagatcctttccaggtgaccccgggtgggccataggcccattcactttccctgcaagcccccgcttcctgtggtgatgggaagccttcgccttggcccacccagagcccggggcagtctgttgaggtctctatatattcagcagggacccccatcccttcctgtccccaggcctgtgtctcctcaggactcagagctggttctctggctcaggctccatgtccttccccatccccagggctgggggcttcagggacgctccatcaacccacaggagcagctcccagaggaacctaagaagccacatctgctttgtggtcgatccagcagtaaatgtttgtgtcagagtgtagcaattccagtaaaaacagagaagaggtcttgacccctgaggccttctcagaacagggtctggcatctctctctgggcccacccagggctactctgggactgaacctggctgtgctcagggggttcctgctcccaggcccctccctcctctgctcaccacctcctgttattttcactgcagtttcctgaacttcagctcagccagatgccagtggggacagatcctgggtctccctggggcccaagggaccagaatatctgtggcccccactcacctcatagatgagagcagctgccctggtgctgggtaggggaatctgggcaggggagagaggggtgtcaggggacagggaaggattcctgctgtgtaggaattccagggctctcctcaggtgatggagggtcccagggtggggttagcacagggagtggatgatcctggccctgaacagaggcccagctcatggccagggcaggtctaaccttatccaagtcattctgggtagggtgggtttgtgctggggattgacagtccccctgccctgagcctgcacagctggggccccagtggaaatgggattgggaacggacagtcttacctaggagatggagctgtcagagggtccatggcctggggacagagacaaaagtgagcacgagagtgttaggatagctgggcccctcctgcaagagtgtgtgggggtcctcagttcttagagaattggggagagggagcctttctcaggttattttaggggtcaagtaagcaagtgaggttgaggaagtgacccatgacccagagcccggaggttagggctgacccggccagttggggtttcctgtgtgatgttttatgggatcctctttgcagccccagggatagggtcagaggcccctgggtgtaactggcaggagtggacaacttggggctggcttagtagttcccagccacacccagactgaagggacactcaccgggggtggaggctgggggctgctgctccctgaagtcactctgatcgctggccctaggaaaggtcagggttatttgtgaaggtgcaaggttaaaagtcacaaattggagttaaaataggggaccaggaaaggagcctatttccaagaggggtatggagacctcctttctttatggagttctgtggtaggaggggcccaggtgaggggagttgaggaaaggccttacaaagccacatctgtcctggccagaggggaaggactctcaggcagatgctgggccaggagaacattgatccagtgacacaggaaagggactgaggacccagggaaggaatcagaccaccaggggttgcctgagaggaagggtcaaggcaccagggggaaagcagggccaggcacatgtgcaggacactgaggggactgcatgcatcttggattctcctggaactcagtgtccctgctgtgaccagacactccactcagggctggagatgctgaaatgggacaatgatcttgtcttctgtctctgccctttggcaagagacataaacgacattccaggatatgccatattggggccccggttctcccttctcacagctcagtgtctgcagttaccatgtcagtcaaaggggtgctgaccccacccagcccgtccaggctgttccagtctccactatgtgataatgcccaggatcccccctcagatgccctctcactgggtggatggattcagtgaacagggggaggtaccaggtattgagcaccgctcccccctgctccaggcagctgtggctttgctgtgctaggaaactaggaccatgctcaggggcatggccttaattggactgaattcactgaggacaaagctgttgaggaagcagcccagggtcagcagctggtgaggaaggtgccatggaatgagagggaaggatccctggggagtcgggaggctggggagagcctggcactgaatacaagacagggtctccttccttctcgcctggggtcagcgtgaaggatgggagcagaatggggaaaagctgtggtacctgccagtttttcggaggagcaggaaacacacaagtgcagccaccagaagactcccaaccaggaccccgatcaggatgcctagagtgttgtcatctgctgaaagaagaaggcaaaggggatgaggtccaaatctgttccagggggaaccatgaggggccttgcagggcaggggcatggtcagggaggaaggaaatgccatggagcctgagtgtggtctgttgtgctgtcctcatagctggctcccttgctctccgtggttgcaccattttctgtgtcttaggcttgaattactgggatgcatcaactcctacattctcccacaggaagcctgcacctcatcctgctcctgtgttttttagtccctccttcctctcacatcactcctcttccccctgtttctttttttccatcccatggcagtcgtaaagggcaggcccttgctgccaactcaatgctgatgagcagggatgatgttcattgactgttttcaggggccttccacatggaaggcacagtgggaatcaatctacctgcagcttttctcaccctcccattgccttgagggagaagggtatgtgatattgtgaaatacgtatttggtgttcatcaccattgatatggttaggctctgtatccccacccaaatctcaccttgaattgtaataatccccatgtgttatgggagggaccttgtgggaggtaattgaatcatgagggtgggttttttccatcctgttcttgtgatagtgaataagtctcaggagatcagatggtttcataaagggaagcttccctacacatgtcctcttgcctgctgccatgtaagacatgcctttcaccttccatcatgattgtgagacctctccagccatgtggaattgtgaatcaattaaacctctttcttcatacattaccaagtctcaggtatgtcttcattagcagtgtgagaatggactaatacagtaaattggtaccagctagtggagtgctgctataaagatacctgaaaatgtggaagtgactttggaactgggtaacaggcagaggttggaacagtttggagggctcagaagaagacacaggaaaaaagtttgaaacttcctagagacttgttgaatggttttgattaaaacgctgatagtgatatggacaataaagtccaagctgaggtggtctcagacagagatgaggaacttcttgggaactggaacaaaggtgactcttgttatactctagaaaagagattggtggtattttgcccctgccctagagatctgcagaactttgaacttgagggaaatgatttagggcaactggtggaaaaaaaattctaagcagcaaagtgttcaagatgtgacttgggtactgttaaaaacactcagttttatgtatttacaaaggtatggtttggaattggaacttatgtttaaaagggaagcagagcataaaagtttggaaaatttgcagcctgatgatgcaatagaaaagaaaaatccattttctgaggagaaattcaagccagctgcagaaatgtgcataaacaatgaagagcaaaatgttaatccccaagacaatggcaaaaatgtctccagggcatgtcagagaccttcctggaagccccttccatcacaggactggaggcctaggaggaaaaaatgtttcctgggccaggcccagggctcccctgctgtgtgcggcctagagacttggtgccctgcatcccagccactccagccatggctaaagagggccaaggtacagctggggccatggcttcagagggtgcaagccccaaaccttggcagcttccatgtggtgttgagcctgcaggtgcacagaagtcaaggattgaggtttgggaaccttcgcctagatttcagaggatgtatgaaaatgcttggatgtccaggtgaaagtttgctgcagaagcagagccctcatggagaacctctgctagggaagtgttgaagggaaatgtggggttggaaccccgacacagagtccctactggggcactgcctaatggagctgtgagaagaagaccacaatcctccagaccccagaatggtagatccactaacagcttgcaccatgcacctagaaaagctgcagacactcaacgccagcctatgaaagcagccaggagtggggctgtaccctgcaaagccacaggggtggagcccaaggctatgggagttcagctcttgcatcagtgtgacctggatgtgagacatggatacaaaggagatcatttcagagcattaagatttggctgccctgctggattttgggcttgcatggggcctgtagcccctttgttttggccagtttctcccatttggaatgggtgtatttacccagtgcctgtacacccattatatctaggaagtaactaagcttgcttttgattttacaggcttataggtggaagggacttgccttgtctcagatgaaactttggacttggacttttgggttaatgctggaatgagttaagactttggggaactgttggaaggcatgattagttttgaaatgtgaggacatgagatttgggaggggtcgggtggaatgacatggtttggctcttcttcacccaaatatcaccttgaattttaataatccccacgtgttgggggaaggacccagtgggaggtaactgaatcatgggggtggattcttcccatgctgttctcatgatagtgaataagtctcacaagatctgatggttttagaaaggggagttcctctacacatgccctcttgcctgccgccatgtaagacatgccttttgccttctgccatgatttcaaggcctccccagctatgtggaactgtaagtcaattaaacctcatttttaaaaaaattacccagtctcaggtatgtctttatcagcagccaagaccagctcggtcgcggagatcctaacccagcagtgctagaggaattaaagacacacatagaaatatagaggtgtgaagtgggaaatcagggttctcacaggcttcagagctgagagccccaaacagagatttacccacatatttaataacagcaaaccagtcattagcattgtttctatagatattaaattaactaaaagtatcccttatgggaaaccaagggatgggccgaattaaaggaataggttgggctagttaactgcaacaggaacacgcccttaagatgcagattgctcatgctattgtttgtggcttaagaacgcctttaagcggttttccaccctgggtgggacaggtattccttgccctcattcctgtaaacccataaccttccagcttgggcattagggccattatgaacatgttacagtgctgcagagattttgtttatgaccagttttggggccagtttatggccagattttggggggcttgctcccaacagactaatacacccattttctggtatgtgactctaaagtccttagaatcttcaaagtgatgtctttttcaagctaataattgactgatgactggcagcccctaggcaacttcagaatgaggctggtcactgacccaggtaggattagagggttgggactttcagcctcacccctaatccctggggagggacctggagtttgaattaatcaccaatgaccaatgaatcaattaatggccaatgattgaatcaattaatggccaatgattaaatcaatcatatctatgtcatgaaccccaaaaggactgggtttgaagagctgaacccatggaagtttctggagtgtggtgcatctggggagggcatggaagctccacaccccttcccacatgccatgctctgtgcatctcttcatctgcatcctttgtaaagtcctttattacaaaccggtaagcctaagtatgtgtttccctgagtcctgagagctgtttgagcaaactaatccaacccaaacagggagtcatggaaacctcaatgtgaagccagtcataagaagctctggaggcccagacttgtgactggtgggaaggtggtggcaattttgtgggactgagccctctgctgatatgtccaggtagatagtgtcaggatggaattggaggacacctagctgatgtacggtgcagaactgattggctgctgggtgtgtgggagaaacccccccgcatcacatttggtcacagaagtgtgtctgtgttgatgattgttattgtggagtgagagcagaggaaaaacacagtttgagtttttccaaacagggtggaatcccatctgccaatttagaatctgaaacttatagtttcagtacttcaattaagattgaagtacttcaattcagtacttcaattaagattcagtacttcaattaagattcagtacttcaattaagattacagaactggtaagtgaaagtgatacaacaaaaatgtaaccaaagtctgctcaacttaacagctaataacaacaaagttcataaaaataataccagtcgatattgatagcactgattgagccctggctctgtgcatgaccttgttaagggctttaatcgcattaatctctgaataaatatcctcacaaccaccctgagatccaggtgtttgtaacaattctacagatgaggaaactgaggcccaggaggttgagtgtcttgcccaaggtcaaatacctggtacctattgtaaccaggatgataactggatgagtctaatccctgagttcttacccacattgctccccaggctctgaaggaatctcatccttctcattccgtgtatcattttacaccccccctccctcctaggaaaatatacaaggaaaggagtgagaggggccgagggtcactcacattttacagtcagcttgagggggtcgctcctgttggagctgactgggttggagacctcacactgatactccccagcgtcctcctgcctgatggggtctatggtgagcatatggttaaaccaggacagcttcatcctcttcgtgacctgcagacgctggttgttgaaaatccactggaaagaggttccagtgttatttgtgtggcaggtcaggaccacggagcccttctctgtgactgtggtgctgctggcttggatggagggctgagccactgactctgtggatagagtgaccaacagaaagtgtcttggggccatgctgcatcctcagagatctcagagtcaaatttagaacattctcctgtgaataaaggagaaagatgaaggacagggaggagcagagagaaccagagacacccatagcagcgagcagtagggactacagtgacctcagagaccccagggaccaggaggacccagctgcctcagaccaggaccagggagccctgaaaaccctcccacagatgagcggccccagagtcacatgagatgcaatacctggggtggctttaggagcaggcagtcagagaaatggaacatgggtctcagcccctaagggacaaggaagaggtgtggccagctcctcctaggatcctacatccaggacccagtctgtaaagaggttatgattattcctttcttttttcattaattccctccctccttcatcagagaactactgagtgtgtgtctcagttgggccttgtgcaggtacagggtgtagtgggaagagaaagctgagtcctttccttcatcctcccatgggagtgacatcaacaaatcaagaaattcatgatttcacgtccagtgagggaagaaatgtggatctgatgggagaggcttggacaatcctggcattgagtctgatagttgagacaggtgatttcgttctaagtaaaaactgactaattctccatttgcccgtcattcctcagaccagaatctccctctctgagctgaggatgcccaagaagaaaggagctgaaccaacatctggtcctggggtccacagatgccccacggtggtggccacgaccagattctgggctgcagacacacggtggtgtgacgttgagcactgacagcctgtgtgatgctgatgcaatttctctttaataaaatggggtaaatgtcaatggtccctggcttgccatcctctctgtaaattaacattaaaatatttacaattacctgacctaaagcttggcacagaatagctccaaataaacatcatctattattattttactccaaaaaaaaaaaaaaaagagttctctgggcctgattcctggtggagaaggagcggtccagagtgtcttttctctgctttccctcctcctgaggacagtgcacttcccgggacatcttttaagtttcccatccagtttaatggcctgggaagtttgtttgtctgtcctctccactctgactctcaggtgaaagatgaggctctgcccttgcccagatggggctctgggggctgagccctgcctggtgaccagctctaggaaccacggccctgggacagctggtaaatcgttgctcacaatcagccctgcccaggaagccacaacccagccctggcacaggctccccagggtcatctggagtcaggatcttgggacaggggcctggggcaggggcttgaagggctgagcttctctcagaggatcctcaggccaggccctgactgagtcctataagatctttctcaggtcatgtctatgaggaggaggccaagcggggttggactgagactgattttcccccgctgcatctcccgcatcagactatccttcttgctgtagggaatttccacggagtccggataagggaaaggaattctgatctgttatagtttgtctcccctgggtgtgtcctgcactaaatgcccaaaccccaacatgggacgtaatgcagagggggatgcaggcacagcccaggcctgacaatcctgcgtatgtgaagcagaactgacccccaacacccagaggcacggaggaatcactcaccgtatacacggagatggtgagatgcctgttcaatctgagaatttctgtatgtgacttgtagggtgtagtatcccgtgtcctctagggtgacgttctggaaatgcagatctccactgggtgatattgtctctcgaccgctgtatgcaggccctggagtcctaacgtgagtgtctattacatatgctgcgattagctggttgggctccaccgttttccctttgtaccagccatagctgtaaagattctcgggcagataaaccacagagagatgaacattctccccttcagcaacttcaaagggcgctgatgcaataaagagccaggcagtggtgggtgcgttccagaaagttaaaagtgaggctaggaaagggagagaatatcagtcaatatttgacctatgcattggcatggaaagacggggtcctgggtgcaggtctcttcacccctcagccttagagggtgtgtgtgtgtgtgtgtgtcctactgggtcaaagtcagcagcatgaccctcattccttcagtacctctgaccttggcatttccttgtgtgaaccctctttcccaggggtctgcatggttccctccccactgccttcagttcctactcacacaagggaatccctgggagacttctttcgtgaagcctcctctagagaccctgggtcttccctttctgacctttcccagctctgttccctccagggctcttgtcagcacctgacctcacattctagatctctttgggtgtctgtcttcccccccatgagattgtgagctctgtgagggcatggacttgagtgatgttagttgcaccccagtgcctgggacaggctgcagactcctgtggatgagttcatgagcgttcccagggccttccatatcctggggtttatttgctaatgtctgaggttggcagatgaagacagagtttcatgccctggtggtgtttttatttaaattgtcactgtgatatagttttactatcattttcaaaatgtagtggccactgacaatgaacttgaaaacatggaccaactgagattgttttgccccttggcaattccagttcacttagattttttggttctccttagacgctctctcccctgagtctctaacaaaagccctctgtctcctctcagagccccatcctccccaggagaccccagccagtctctgtgctccctcctcccacccactcccagggagtcctcccctcacctgtgagcaagagcccctgccaggggatgcattctctgtggggacaagctgaggggggccccatggtctctgctgcctgctctgtcctcctctgtggagaggagcttgggctccaggaacgctctagacagggttactgtgactgttgtctctgctgtccttccttcctctatgctgagcttcctctcaggcaggagcacttcccgtttatgggcaagggcggggctctgcctacaatgtctctctgtcccctcccctctcagtcctgcctcccttgtccctcctttctccttcctttttgcctatatttggttccctaggcaaaactttgagaagcaacgctgatggggtcctcataacaggacgacccactctccccagtactgacctctgctgtgttctggccttggttctgtcacagccggtagattatttccctttgtgacacacaaaaccagctgggccctgggtctcctcatgctctccagtgctccaggaaggcagaatgatgcccagcaggaaagtgacagaggtggctctgggggctagaaaggggctcactgggtgatggctgggaaggacccacccgctatcttcagtgtcaccagcctggcctctgacccagggacagagacccaggcctggaggtctcgggaggatccccagctcctaggtgtggagggaggtgtcctgtgtgtcctgggaagagaggactttgatggaaggaggtgggaggctctgggttctgctgtccttggtgaaggtttcagggggaccctctccatgtctggggtctgtgcccccagcttaactctcattctctttgcaaatacatatattttgtggatctgcagttgcctgaactgtctcatgtccctaaatctttgtatccctttttacagaaggtcaggaagggtgtgtacatgagtatgaggactatctgatcagggcgagtgtttgtttcccaaagatctctttagatatggtataatacataagataaatgtactgaattagcaattttaagtgtagaattaaatgatactaattctattcacaatgttgtacaaccatcaccataattttttaccagaaaatcttcattataccaaatggaaacttcatacttttaatcaataactccccacttccccctgccccacccactggtagcctctgatactatcaatctctgtgaatttgcctagtttacatgtctcatataataaggaattatatacgtgtattatttttttctggattatttctcttagggtaacacttttaagattcatccacgtcgtagcatatattacagcttctttcctatttatggctgagtaatatcccaatatatgtttatacctcaattttaattcattcatctcttaatggacatgtgggtggtttccacatttttgctattgtgaaaaccgctgcaatgaacttacacttggaagtatctgtttgggtttctgtgttcatttctttgggggtacatataggagtataaatatggggtcatgtggtagttctatgtttaagtttttgagaaacagccaaactgttttccagtttgctgtgctattttatattcccatcagcaatatacgagggttccattttctctacattcttgtaaacacttactatttaatattttttaaaacttatagccattctagtaggtgtgaagtgatagctcattgcagttttgattttcatttccctggtggctgatgaagttgagcattttttcatgtatttactgacaattttaatattttttagagaactatttattcaaatcatttgctgtttaaaaaaaatgggttatctttttattattcagttgtaatagttctttatatattttagatacaagtcccttatggggtacatgatttgcaaaatttttctcatattctgtgtcttctcactttcttcatggtgttctttgaagcacaaacatttttaactttgatgaagttcacttatctatttttaattttgttacttatgctcttgatgtcatattgaagaaaccattgcccaatccaagatcattaagttttactcctatatgttcttctaatggtttgataagttttgctattccatttaggtttttgaaacattttgagttaacttttgtatgggctgtgaggtaggggtctaactacactatctcgcatgtggttatccagttgttccagcacaatatgaagaggctaccattctttccccattgaggaatcttggcacccatgtcaaaaaccaatgggctgtaatggtgagggtttatttctggactcttgattctattccattgatctctatgtgcattcttgtgccagaagcacactgttttaatgattgtagtgttttagtaagttttcaaattaggaagtgagtcctccaatttttttttccagattgttttggccattctggggtgacttttaaaaaagatgtagttcaatggttctcaaagcaggagtggttcagctctccttttttggcagtctggagacctttttaggaccttaatctaagtagataaattattcccactttcttttctgagttgctatgttacagtgtatattgacacccatgaaataattgagagaccctggaagtgcttgcctacatagtgagggacaattagttccatgatcatgggcacagaagattttgttttgggaaacaattttgttggtggagttatattcatgcttactcttttatttgtcttcatagcctgcatctccttcagacttcatatctgtttattttcttgtttgtcctctggggtttgggtgttgggtgaccagtcagctggagctggaggaggtgcttagcaaggcagtgaccctggttgggaggagcagggctcagcagggtgaaagtagctgggccttgagtcaggagtggcatctggaaggcctgactgtaagggtcagaagggccagcaggtgggtgtcctaggcacaaacggtggctgctgctgtggactggaggaaggtaagaggccccgagtattccatgttcttactggctccccaactgaggattcctctcctgggctggtgctgtcctgcagcagggaggggttagacagggacggctgcacatcaggccggagtccatgtcatcctcttaggcactgtcactacagattgaggattctgttcataagccaagcctttgcacaaggaagggacccgggctctcaaggaagagcagctcctggtcagacctccatctccttctctctcattgcctgaggcctcaagcttggtctacctggcacaggggtctggatcctcctcccagggttggggtcttactgagctgggcacctgcaggtgggagaagatctggaggggccccatctgccttcaccagattgatgttgagggtccctgagtcctgcaccactatcaggtgctgagcaacttccagtgtcagtgacaaccaccccatggtggaagcagaaccacctcgtgagaaagcacctccaagcctcagtgcttgccatgtgtgggaatttgctggtttcagttgggggcatgttggtgggtggtcatgaattcagggccggattctatgctcacagtgcacatgctggatgtggtacagaccccaggcagggctcagtggggtggttttgggtgtgcacaggtatcttttctggaggagctggtggtgatttggctcccagaagttcctgagctctgcagactcaccaagcactcaatatttgagtgaacattgggcgagagagcagaaggtaagtgtcagggcatcggggttggtgcctctgggaagaggaggaacattctgggaacaaagctctcccccggcttacagggagcttcccatcgctcctgccttgaggatcagggaaactagggcctctgctcttccaggggctgcttgcaggcagtttgctctgggagggggtgacccaggagttgcctctcattttgcatttgagatttaaaaggagaagggacagtatatcttgccaggtcacaaaaattacaggcatcatattgactgaagggcactcctgtcatcactgcaatataccagaatggtcttttaaaaaaataagtgatttaggtttaccagcaactgtaatgcttgttttattcttctagttcaccgttaatgtcacttttgtagttttagcactggcaatgttgattttatgttgactctgatgattttaagctttcatttgttcacatagagatcatcttctttctgaatattaatgcattttttctctatttctactggttattcctgtacatagagtagagaatcacttttcccaaggaggtggaaagcttctgactaccaaaaaaaaaaaaaagtgtcaaaatgctttaaagtcagtaacttaaagatcaaatccaagagtgggcaacagattctgcccagggtctgaaaggtggagaggtgactggtgaggatgtttaaaagacctctcctctctactccctaaatgggggccatccagtgttcttgaggttcagagaaggcccagggctggggcagcagggcactgtcagctcccagctcccaggggccaggagtaagaccccaacactgtccagacactgattgcattcattttgggggagagtagattcttatttaaagaataatacaaaagtctacaaatatgaacataaacagaaattcctttgctacaattttccccttaataagacattccttcctaatgacatatgtgactgcattcatggctgagatgttttctaggatggtgagagcatcagagtggactatctggtgccttggggtcatgcattttcttcttccaatgtctacaggatcccccatgtcccactttgtagtgtaactcagtgtgtgtcattctggtttttgttgtatagatccttggaaagcccatgtcattcctgctgtgaggtacaggcagccaaatggcatcatctctaaacatgccttctcctggtacatcaaattatggaataaatgaaagccattttgacagatattgaagatataagtttctactcttcccacacatgcttctcccaagtgaaggattttactggtgaattgttattagagattagtgtggatcagtgactctgccaggggaaattttgccctctaggggacatttggcaaagtctggaaacattgttggttgtcagagctgggggagggagtcctgctggcattgagtgggtggatggtgctgaacaccctgcagttcacagagccccaccagtttgaccacccaaatgtcaatgctgaggagtggagagccctgctgtgccctcccgcagcttccctgaagcttcccctcacctgctcctcccatgtctccccaccacttccccacttcacccgcctccttacacctcagtcccctccacctgaactcaccccttagtccaaggccagccctgatctccgctctcctggtctccttgctccttagcaggaggcgcccactagatggcgcccttgcccttactggagctcaccgtctccctttccaccctgagacaaatgtggctgcttttactgccacaaccccagccctccacactctagatttgctcagggagcagctcctggacagacctcagggaccccagggaggagcctcactctggagattttgatggcatggtctttgaacttcactgttacccccagtcaggatccaggatgttgggagtgcatgattctgcccggtcccacttcagcaggaccccactgctgagttgtctgtggggacccgggcctctcatctccttcttgcattgcaggagagggatcttagcactgctttcacataaagtcagataatggaggagtgcaggtgagtttgggaaggtggacatgaagagaggttgtgtccctagaggtggcagcagtgagaggatgggcaggtgggaggaacacagcccatccagggttgccagccatattaggagcgacagcctttcctctaagcctccagcctttttcctgaaacattccagaactttccacttcagcacttcccactgaggctcctcaggtctgtccctgagctcccagctgagcctacctacccatctgaaatcctgagtcctgtgtcaccctcgttccccattattctgtgcagttctgtgggacgcccagctctcctgacacccccagtcttcagaatggccatcagcgctgtcgctgtggcaccagggtgactgccgcctggaggctgagtcctggcttcctgacagctgtggggcccgctctaggctcccttgtcctgatcattcatcacctccaggatgcacagcagctgggccagggggaggagcagggacaggtgtcagccaccctgtgtgtctgcaagtcaggctgggggtgtgggaggacgccaggaatgactgaactttctgatttagagggtgagagcttgcactgatggaatttgggatttaataggaaaagcatagcgttttcctattttgtaggcagggtggctggagtttggaatcatagattcccctgggatgtcactgtggacctcagtcccacccgttaggggcacagatttcagaatccacaccctggggcaaagcaggcatgggaggctccatcagcctggccagggctctctatttgtgcagctgctgcaaggagatgtgcactctgatgggaacagtgctccctcctccttggggggcagtatctagctccctgcagcccctctccctgcaggccctgccctctctgaacctcaccttccccaacccgccccccgcaatcccatctcagctgtaatcccaacactttctcatccattatgggtggactgcttgagcccaggggttcaagactatgctggctggacaatatagcgagttgttgtctctacaaaaagacaaaaattagctgtgcatggtggcatacacctgtagtcccagtcactcaggaggctgaggtgggaggattgcttgagctggggaggctgagttggcagtgagttgagattgtgccactgtatacttcagtgtaggtaacagagcgagaccctgtctcaaaaaataaaagtaaaaaaaaaaaaagaaatatggaatacattattgttaactctaatcaaccatgctatgcaatagtccaccagtaataccagtaatagccaataatgaattatctgaaaaagaatacaatttattcttagctatctactgctaaaatttttaagctatcttttatgatagctgaaacaaaagaagtaaatttaaccaaggaagtaaaagacctttataatgaaaactgtaaaacattgatgaaataaattgaaaaagacacacgcacaaatagaagatattccatgttcatgaattggaagaactgatattgctaaaatgtccttaccacccaaagtggtctacagattcaatgcaatttctgtcaaaacaccaatgatattcttcgaagaagtagaagatcctaaaattagaaaccacaaaaattcctaaaacctgcacaaaacaccctgagttgccaaagcaatcttaaacaaatagaacaaagctagtggcattacacttcctgacaatcaaagcatactgcaaagctatagtaaccaaatcagcatggtcctggcataaaaacaagcacatagatcaatgaaacagaataaaaatcccagaaataaacccatgcatctctagctaactgattttcagccaaggagccacatgcacacaatggggaaaggacagcctcttcaataagtggtgctggggaattggatattcatatgcagaagaatgaacctagaccctatccctcaccatgcacaaaaaattaactcaaaatgtattaaataaagacttaaatgtaagaactgaaactatgaaactactagaagaaaatatagggggaaaatccatgacattggtctaggcaaagagtttttggataaaatctcaacagcataagcaacaaaaccaaatataaacaaacgggatttcatcaaactaaaaagcttttatacagcaaagaaaaaaaaggccagcagagcaaagagacaacctacaaatgggaggagaatatatttgtaaatatatacatatatatttgtaaatatatacatctgataagaagataatatccaaaatatataagaaaattatgtttctgtatagttttatctgactgggatacagaggccacatccacagtcccatcctcaaaggccacttgttcccaaaatgtcaagcacatccctcaatgatccatcatcaacacctatgtctgtaggatgaagggtgaatcatgaagcactaaaaaggaagaaggaagccaatcccaaaacaaaatgatgcagggtctggaaagtccaaagcattttttttttttttttactgcatcttcctcctttcttctccacattcccaatcctcactattgattaacaaaacaaaaaaaactgggacccaccatcttccctactgtcaggagatctagcgagattgtttgagtcttagaccaaactttgccataagccaaatttctggctgactttacaatgatatgagctagcacagtctctttttctgccagtcaacttgtgctcggttttatttgcaaccaaatagaggtggtaaccaaatataggtgaccctaaaattagtcatcaggatgaaatcctaaaatgtgcaacaaactgggttgaattcaggattagtagcaacatctctgttgtgggcttgaaaagggggcacccttttatgcagtagcaaaattgctaaattgttgtttgctgagtctttggactctcatcccggattttctatgaccattcaaacagggctgcaatgaacatctatggttgtttagcttggcacacttctacatttctatatagtaatatctagaagtgcatttgctcaatcacaagatatgcacattttataattgactgctatcgaactaccttaaatagccttaatttgttctcaacattgtttaacagggtctgtttaatgtcctacgtccagcaaggacagtatcacttttcttaatatttttcaaattattggaccttaacaaatacttaatgtgcaattaattgattcctttgtattcccatgccttcttttatatgtttccttatagtacacaaaaccacattattgtttctttacttgtgtcattccaccctggaccattcctatctaaactataacattatgagagagagagagagagaaaacaatatgaaaatataaattgattaatcaaaaaaatttaaataggacaaatcaggaagacacaagagagattttaaaattattcagagaataccacaatagctgtaccaatatattttaaaacttagatgaaacggacaactatctcgataaatgtaaattaccaaaactgactcatgaaaaaatggatattatgaatagagcaataatcagtaaagcaattaaaaagacagttgataatttttatttactgacaacaataacaaaatttcaggtcctgatatttttatggtgaattttaacaaattttcaagctcctcctcaaccaattctcagaaggtttaaaactttaacaagaaaacactttctaacacattttcagaagctgttatagcatgataccaaaaccacacaagaaaattatagaccaatctcacttacaaatatacatgcaaaatcaaacaaaatcttagtgaaccaaattcagaattaataatagcaaacaagcaaaatatgttatcatacgtatggcttatatcaggaatgcaagtatgtttcaacatcagaaaatacttctccacattaacagactaaaggagaaaaacgcttgtttaattatctcaataggtttttagagaattttgaaaattttataaagttatgcgtattctgtaaaattgatgaaatccaaccttgatttatttttaaaaattgcctttcctatagaattataggtaaaggaaacacatgcatcctcacagagctacttcaaggctaagttacttcccataagtaacgtatcctgtaatgtgtgcttggcacatattcaatactaaacaaatatttgcaaatcctcaaaccacttctcgctcaaataacccacctttgtcttttgcctttatgttagggttgattttctcaattgtatcttggagatcctttggtgggtctttcagcaattaccctgaatttgcttttctgtttacaattttaattcctgggaactctttcttgttctctgactgcacccttttcatgagagttcagccatcaatcctccagaaccccaccccccccgcccccccaaaaagcaataaagatgtctaaaagcttccttctgggctttcgaatgatgtttaccccaggcatttgttctattcgttcatcacccattttccctacaacttgcctacacttgatatcagatttttatttattagtcacctatcttcttcattggcccattttcctattttgccactggttgttctcaaatgtgttatgattcctggttgtacagtcaagtggttgataatcttggatatacgataaagatttgctctgtagctgtgtgtaagcctatataaaagcttttgtatttttcttcttaaaaaagacaaaagatggttgggaagatccctccagttcaccagttcgaggctgcagtgagctatgatagcgccgctgctctagcctgtctgtctgtgaaaaacaaggggggcggggggcgggggggaagactggagatgtaaatctcccgcagggccctacccgtatccgcaacaggtctctaacaggaacagcctcaggcctgtgttggaacaaggtaggttacagaaatctggaagccagatctgtaacttcagggtaaggactggctctcagggctgatcccccgggctgggtgtcccagaggcacccgcccccgccccttccccaaggcaggccaggacaccttcactcctctccttaggctccccacccccttctcctccccactgtgcctcctggagtagcggtggcggtgccacaggggagcggggcggggcgggctctgagggcaagggggatgggccccgccggggtcactggcggccaccctggaaactcgacgcaggccggcccttctagtgaatcgtcccagccacagctggcctcccagccgcgcttggggcgcctcggggcgcgaatggtgcaggttggggagactcaccacgcaccgtcgggggtcggtccggttattcctcaccgctcggctccagtgggcgcgcgggcctctcctcctcagttcctgcgctgcagtccctccctcacccttcgcagcttgggaatccaactgtgtcattccgacggagcgccgtgaggacctccgagggtgttagcgccaagtgatctctgtccagcgctctgaatatccaagtaaaggagttcaatgaagggcgggtcaacggaggagaaaccgtgactctctcaagggagcccaaggcctccttgtctaattagtgacgcgccaatggatggaggctcttcccaccatctcttcccagcatccagtgacaccaccgccaagggacgggctcggcggaacctgcaggaaagaagcatcggctgagcctgactgcagcgctgtgaagagacaggggaggggatcagtagttggtcccgcgcccaccccctgtttccgcgaggggcggagttgactggccatgcaggcagagggcgaaatgtgaaattccactactcctaccgtttttccctgacccgatggggcggagtgtcgtcaggctaagttccctggcggtaaggtggggagattgaggcgcacacctgccgaacggtaacgcaggattagctaaggcgagctcaggacagaagcctcccgaggagcaggagggcaaaataataaataaataaataaataataaataactcactccttggtctttatttgcggcaggaattcagaaggtgaaagcggggccttaggatctttctgaccttttgggttttaagcaggaggtgtcagaaatgttaccacagggctagctggcttgtggccagcaagcgttcacaatgccctcgatttttcatccctctctgtgggttctttttttcattgtaaggcagaatttctacgattgctcacccactcagagaacctgagctggtttagaccaggtgagacaggctaggtttaccctggtgatgatgtgttgttgccatggcgatcctgcccagtaccagaggccctgcagattcagatgcttggtgcctgtgcttggctgaggggccaatgggtgaagctgccatctgcgggatgatgactgaagcctctaagtcagaatccgcccaggctgagccttagggcagctccatggagcctcggctggcctgggatagagagtccaccactgtgccagcccccagccactgcctaggtcctgtgctgagagccccttgtccagggaaatggcgtccagtggaaaagggaccacccccttgcccttcactcaaggcaggttggtgacaaccctgaagctaatccgttcctagaggagctgcttctgggtccgagttttctctgcagcagagcagctccctggatgggatctgttcaaagtccgcctttcacgcggaattttccgtccttgcaattttccacctccaccactaggggatcctctctgaccgcctcatgccggctctggcctctgagcaggggtttctcttctgcatgtgcgaccttgcgcatgcctagtggccttttgggacctagagctgctccacaccccgatggggttacagagtgcctcgcctccactccaccccaccagggttccttccctggctgggatgggatttcagaagcgccgaggaacagcccagacaggtgtgggagagtagccaaggcccctgtcccggggtggccaggacagcggtggcctcgcataggacctggctgggctgctgcaatcagtgtcctgccccttggagagcaacagtgaaaacaacaagactatcttcacccaccttaagaaagaacagaaccagtatccccaactctgctgtgtatcccaacccaattccattccccaccccactctcagtagccaatatgcaaaatattagaatactcttactgttattattttcaaccacactctgcatcctgaaaaaccatatatttcgttatgtgcttttaaacttcttgaaaatgaaatactgaggctgggcgcagtggctgacacctgtaatcccagcacttcgggaggcggaggcaggcggatcacgaggtcaggagatcgagaccatcctggctaacacagtgaaaccccatctctactaaaaatacaaaaaattagccgggcgtggtggcgggcgcctgtagtcccagctacttgggaggctgaggcaggagaacggcgtgaacccgggaggtggagcttgcactgagccgagatcgcgccactgcactccagcctgggcgacagcgccagactctgtctccaaaaaaaaaaagaaaaaagaaatactgaattttcaaatacttgctttttttttcggtcaaaattatgttctcaaatttcactcctgtagatgtgcgtggctggctgtagtttttgcatttttattattaggtattctcctgttgcattaatatgccacattttatttctctcatgtttttggtgaccacttggggtgttttttggttttgtatttttgctgtatacatgctgccatggtggacatacctctttatacatatttcctgttgtatgcagacacaattttaggatgtgacatcttcagcttttctattgtgtcgtgtgtcttttccttcgtgctttgtgttatttacatattctggacacagattctttgtcaactgtatgtgctgcacatctctttcccagtttgtgtcttcttcttcttttttttttcttaaaaaaaactttctttatagtgttttttttttctttctttctttgttttgttttgtttttttgagatggagtcttgctctgtcacctaggctgaagtgcactggccgatctcggctcactgcaacctccgtctcctgggttcaagtgattctcctgcctcagcttcccaagtagctgggattacaggtgcctgtcaccacacccagctaatttttgtatttttagtacagatggggtttcaccatgtttgtcaggctggtctcgaactcctgacctcaggtgatccaccctctttggcctcccaaagtgttgggattacaggcgtgagccacagcacctggcctgtgttctttcttaagtagatgttacttttaatataatagaatgtatcatattttgcttttatattagtactttttctatctaattcaaacacatccccaagggtctttgtgtgtagactgaccaatttctcaagaatcatgaatgaatactgcttctctttccccaatttatctgtaatgctacctttattataaagtttctatgcatgtgtagaaatagttcctgatttttcactctgtgccaccagcataccaatagcacgctgtcttaaatattaaatagcagagctttatgagacaacttgatgtgcagtaggcaattgcccccttgttactcttcttcagggttctttgttgtaccacatgaattttagaattggcttgtccagctaaaagacaactgcaaggattttatttggaagttcataattctatacataatttggggaaagtattttcataataccaagtcttcctattaatgaacacagactctctctctctctcccccacccccacctgtttagttatttatatctttatggtctgttagttattgtttattgtctttcaaccaggtttcatgtttttctacatagaggccttgcatgtgaaagtctttcttcctagcttgctattacaaattttttttaattgcactttttgggtacagtggcttgtactgtaatccccgatacctgggaggctgaggcagatggattgcttgagtccagaagttcaagaccagcctgggcaacataatgaggtccctgtctcaaaaagtttgttttaaaaattgcatttgctgttattcaacaaatgtcattgtgtctcatatatggatttttatatctgataaccttgttcaacaatcttttgattctaacaatatatcagattcttttgagttttccatatagacaataatgtcatctgtaaattataattgtttcttctttgttatttcttggaccttttattttatatttttgtcttgctgcaaggcaatatccctctatatattgtggggtcttttttctcataaagtggggatggtgaacacccttgtcttgctctctgattgtataaagcatgctttctgtagcattttgtagacgctcttttttagattgaggtaattcacttttatttctggtttactgagtttttagcataaattcaggctgaatttgagctaaagctttttctggagacatcatttgaaaaattcatatgatttactttctttaagtcaccaaagttatgatttacattgaactgagtttctactgtttaactgtattcttgggagaaaacccacttgtcactgaacaatatctgttttatttactgctgtcttgtgtctaaattttcttttaggattttttgtatatgctcagattagcctgttattctcctttctgtatttttttctggtttgggggtcaaagttataatagcctcacaataagagctaagaaaccagccctaatggaggccggggcaggaggtttggagttcaagaccagtctgggcaaaatagtgagacccccatctctatgaaaaatagaaattagccaggcatggcagtgagtacctgtagtcctaggtacttgggagggtgaggcaggaggattgcttgagcctaggaatttgaggctgcagcgaactatgattgtgccactgtactccagcctggatgacagagcgagaccctgtctcaaaagaaaaaaaaagaagaaataaaaaggaaaagataaaagagctaagcatctgtttccttttttccattttctgggagagtatgtgtaagactgtaattaactgtttcttgaataatgggagaactctgtaaaataatctggctttggtgttacctgtattggaaggatgaaaaataccaattcagtttcattattggttgatagggctactcatgctttttgttttgttttgttttgttttgtttttgagaggaagtctctctgtattgccctgttgtccaggctgagatgcaacgttgttcacaggcctgatcctggctcactacagcttctaacttccgatctcaatagatcctcccgcctcagccttcccagtagctaggactacaagcatgcagcatcacatccagcctcttttcctgcctgacccagttctggtttcctttagttttctaggtgttcatccattttatctaatgtttaatgcatttggcataagggtgctcagtgtcctttcattgtctgttgtctgtaactgttgccattttcattcctatttatgagtactggcgtcttctctcactttttcttaataatcctgctggaactttgctttttaaagaacatcttttgacttgttgattcttttttcatacatattaactattttcttattttttgcctttatatttatttcttttcctgtttgaaacattgctcttttcttactataaaaatgggtaagtagctcatgaattaccacctcttttaaaaatcttttctactgtaagcattttagcagtttacatttgcccacaagtaccacttcagctacaccctatgtgcttttacataaagtcttcatttttggtaagacatattctcaaattttaattatcacttgtttttaaatccatgatgttttatttgaaatgttgtttctaaagatacattttctggttatacttttattcttctaatttagcacagtggccacaaaacatggtctgtgcagtgcatacaatcgatgagtaatttctgagctgtagtatttggcataatatatggcaaaatttcctaagttttccatgtgtgctttaaaaaacttccagtaaaatacataaatctgttagatcaagcttctcacattgttcaaatagtctatatgtttactgattcatttgactgcttgatttatcaattacaggtaggaatgtattcaaatctcctattaaagtgtgacactcaagtggctttttaaagacagagatgccaaaccaatgaatacatgattttccccaaagcctgcacaaattctctaatgaaattttaccatgaaagtttgtttaattaaggcttactaaagcagtatgttgtcttttactttttaaacagagaatatatattttaatacatcgtttaagtttatgattaattatctattactgaggataagaatctttgcctgtgctcattcagcatttgcacttcatttatgatctgccttctcatagcttctgttaatttttatactagagacatttatttgtttgtataaatgttgaaggtttttttttgttgttgttgtttttgagtcagagcctcgctctgtcacccaggctggagtgcagtggcatgatctcggctcactgcagcctccatctcctgggttaaagtgattctcctgcctcagcctccagagtagctgggactacaggcatgtgccaccaagcaaggctaatattttgtatttttagtagagatggggtttcgtcctgttagccagggtggtctcgatctcctgacctcatgatctacctgcctcggcctcccaaagtgctaggattacaggtgtgagccaccgtgcccagctgggttttttatattataaggagatgtaatagatagatagatgtttcaaagatagtcaaatgtttttaaaatttaaaacacttttttacaggttgactttcaccatttaatttcatctatgtgttttgccttagagaaattttaaatgctatgtagatctcatgacttataattatgaagcattttgttttctgttttccacgaaacttagcttaactttgagcatataatagttgtaaaggtaggagagtaacactgaaaaaaggaattgcataaaaatggcacattttctgtagagttgtttatcgcctgaaaataggccccatttcatggaagtaagatgatcaggctcaggtccccagacgaaactcttggcatggtttttggagatagtccagggctcagtactggctctatcatttgctacttctcccaaagtaaccaatatctcatccaccctgagcccatttccatatctctaacatgaggataatagcatctaccttacacaccaagtagagggatcaaatgtaggaactaaatcaaagtaccagcactgaataacctacatcctcccacttcccaaaaggaagagagatgtatcccctgttgacaaacgagaccattttgcaggagagaaaggaaatgccagttcacttgcaatgtaaacatgctctctctttttagggatgtccagggacctgagagagaacccatgcttaccaaagagtttctagttccagacacacaggactcgaagggtgacaagtatggttttcagggtccctgaatccacccagtcctcacagaaactcctaaaagctgtcgattgacagcgttgagttcacagctctggtcctcacatgctgatactgcttgtgatatcgaacccgacaggaccccacatcacaattgatttaccaactacaatataatacctcctgaatctccaaattggctcacccaggaacaaaggcttggggtaaaactggattaggagatataagctctgaattttctgagggtgagacacacaaggattctaagtgacacgccacagagtaacgggtctgtgactggaggacccacagatttgtcttactggagacaccacatgcacacaaactccatccttagctgtggaaacaagggtcttttgctatcttagccgaattctgggagtaatttttggaggggaggagatctttgggattgcctctttcaggccctttacaaaaatacctacttcttaaatggtaaagcttacactaaactgaaaaaattacatccttggctttttatgaagtaggtgttggattgaatcactactggaagaagtatggcatcgcaaattctaagcagtggtcaaaggatggatctgttaaattagaaaaatctctaaatttataaaaagattttagattcctttattctaaacaattgacctatttgtactcatgggacaatcaaatttcaaaggagatatgtaacgatttcatggcttgcattaaaaatccttctgataaaattaaagataaaaaatctgaccccctgccaaaaaaatcttttgaagttcatactgcctgctttcaatattctgtgggattcacaatgaaaggtgccttatattgtggcctagcttcaagtttatgccttcgccaccatggcctgggttcaattcccagtcagggccccagcgcctttggtttaatgtttgcgtggcatttgacttttttacctatttagtattggtgagattacctttggtaaaaaaaagtttaaagagtggaaatcgcaattctttgtgttggctaaaatctgattataagagatctggaaggttttatttttctttttcaaagagctctatggtcagaagtcggcttcatgaaaagctaatatttaattatatgtacatacagtctttctggattttctcttttgcctcctgttttgaaaaatatttggatttgagtgaaactccgttttagaaattaattgcttggtacaatatacccatgtaactaccctgcacatgtaccccctgaatctataataagagttgaaattttgacaaaataaaattagattttgaattaaaacaaataggtgcttggttcctctgctcacttctttttaaaaggaattcctctcccatgtacttcttcttttcccttctttaccttccttttggcatctttggtatcacatgaagggatctagagggaattttaagtgactctgaaattccttgagaaatacacaaaaagatcccactcaccccttttgggggtctcctgttctccttgtggagtccagagtcagggacaggctcctccaggtctgcagctctgctctcttttatttcatcttggctgattgctttggttttgtgagtaccaggcattactttgtactgtgagagacacgtcctttgtgagtgcaacggctgctgggtcactggtgagggctgcagtttggagatggctgagagccgttgcaataaatggttgtgattgcagggggctccttgtttctttgcaagtttagatgagaaaggtgcagtttggacacagtttaaaggctgtgaaaacaccaccaatgaatatgatttcctttggggatggtctgattaaaagtgggctgattgttgctgtgctactagccttgaagacatgtttctacagcattgtgcagtgtggaaaaattgtgtggcttggtcttgtggcatgtcccttcttttagagacctcagattcaatgtgaaattcgggatttttgattttcaaagatctagatgccctgccttccagatgtgcctactcttcacatattttaaaattagatcctataaactgcaaatactttgttggcttctgtgagatcagaggtccagttagaaaaggaagacagtttgttaaaattaaaaactatttatctaatctaactagattggcctccaaatatgactttctgacattcagctggttactctgaaaagatttctaaatctcttgaggctcatctatatgtttccttgcaaagaaaaaaaaaaaaaaaaaaaagcaagcccaagcactagtaagaaaaagatttgcaatgtttcatgaaaggagtagatgagtgaagcatttatttgtagatactgggttggatacctgtgcaaagaagaagaggtcaataataaaaattgccaggggatttcttggaacttaacaagctgaattaaatatagaaatgtcaggaaatcaaggcaggaaatactcacttgtggttaggcagacagggcagggttctgagcttgagatggagcaaacagttgtggtgggtgaagttcacatgctttagagctcagctgtcctagtaaagaagcctaagagtctctaaagctcttatgagaagatggattttttttgcctagattaaaaggttaaagaattgctttaagttggataaaataaagctaaatgtttaagcaagttgtgaaaggtttatgaaaaaattaattaaaatatttttgtgtgtaaacatattgactaaagttgaaggggtataattcagcatttctgtaaattgagcattgaaataaaaacacaatgggtttctcttagagcactaacctgctctttaacaaaaattgtaaagggttatagaaagtctataaaaatgttaccttatggtcaaacattaaaattgggtaaatatgtctatcaggttttattaagaattaggtttaacattaatagtacactaatgtaaaggtgaaatttggcttatttggtacaaaaatcatacaggaagcattgtgaaatataaaatgatttttagctttctttgggctatatttctataaatatgttattgatgagggttccaaagttatgggagactcctataattctgctatatctcagtgtacattatcagtcataattataattgtcatgttaaattattgtgggccacagaggtaacagatttccttgtcaattgtgtctttgactatgactaccctaaaacgttcagtcacccatatacacatgttaccttgttttggccctctttagaaggtaattttataatcagctataaagccctaacaggtgctcttaaatgcaaattttgataactttggagattgtgacatcagaagagaggaaaaatgttcgggacacttggagagctaaaatgttcattgatatcaagcaggacaggaattaactgcatgaagtgaactaataggaggctgaagtgatctttttgactttttgcttaaaacgttgctgatcctttgttttgcttttcagagtcaaggcaaattttcttttgagctattgacagcttttaacgattaatcaaaatatactcctatgaacaccatttggagcattatttgtttctctctacccgatttccccagaatttggaaactatttgtgggtattcttaatttatggcaatatagttatttgcataagtgcaataagaatgtgttttctttggtaacaggacacaatttgaaaaactggttattttaccaaggttttgaccagaatgctgtgctttcctttaaggaatcaaacttgacttgtggagctaataaagcctttggaaaactgaccttatatcctgtgaacacagtccctgtacagggttactgatctgtgggaagaaaagaatgtcacattctgacaggtcaggaatcccaagttatcttgaaacttcaagaggacaggaattcacccaaccatatgtatttgatggtagaaatccatggcaggggctcagctttaaaaagtcttatctcagattccttctataaaacaaagtcccattaaaaccaattttaaaagcctatgtgaaaaataattattcttgctgcacctcgtacaaataaagtggcaaagcataataaagcaaattggtcctgtcgtaatttgtctttagtaaaaacgggaaactggggtcgggtgcagtggctcactcctgtaatcccagcactttgggaggctgaggtgggcagatcatctgaggtcaggagttcaagaccagcctggccaacatggtgaaaccccatctctacaaaaatacaaaaatgagccgggcatgatggcgggtgcctgtaatcccagctactcaaggggctgaggcagggaagcggaggttacagtgagtcaagatcgtgccacttcacgacagcctgggtgacagagcaagactccatctcaacaacaacaacaaaaaagggtaactggagagagggaagttatgtttcaaaaacttttggaaactatagtacacctgtttttaaattctagtctggcattcagtttttattattttctacagtttgggttaaattcgtatttctctggctacaagtctcctaaataatcttttcatttgtttcctttttctttccctttttccccatttttcttaattggaaatcactgaaacctaagctgtgctttcttaaagccctgtgaactgaagactagacaaccgaaacttctgaaggaagtagcagcaacctatttatatgtgttgctgttgcctactattatgttttagcaggtgctgcctctacacccccgaaacagagagtgctactgggaacaaatcgactttttccactccagtgctgcattcggtgccccataacgatgaccccctctcagcaggaagtagccagaaagattacaatgctccatctccctatgattcttgtgataaataaatatacaagcatgatagaaatcatgcgcaaattgacagtggggattgtggcaggccagatttcactaatggaggtccccatcacaactacttcagtactgactgagtggttaagttcagtatcaaaagctgaaagtgccagcgcctttctacaaaggctagaatgtaacaaaagcccaccaagggttttacctaggcctttcctgggccttacagcatgacaaaacaaagaaggaattcttaaccagacctgtttaggattaaacaaatttaattgggggtctgaagaaactcgccaggcctccacaaacaagttcattgggggtctaaaggaaccccccccaaacctctgtgattgagcaggagacaaggtcagggtaattgccccagcacctggactcatttagatttaagtaaatgtactgaggctccagagaaaggtctccaagacttagactagagttacagattaaaagaagttaatcacttatatctttagataaatgcacactgacacgtagacatacatcttagaaaatatataagctctggaaaaccttgtaatttacagttggtctggagatattttctgggccttctctctgtaaccggttccagaaataaaaaactctcttcctccccagtttatctgcatctcgttattgggccgtgagaaatagcagccagaccctgagtttggtctgggaacacactggctgggcttcctgcctggcggtagagcttcactgtcctccttcccagccaaaatgtggcccttgaaggcttcctccccaactgaccggttttgggttctaggtactcagggaacaccgtcttcaaggaggccattttcatactgttcctggtttgatttttctgaaattaggaaatgccccttgaggcatccaggattgtctttatttcccctgaagcttcccctcctgaagaaaaaagttctcaaacaccctcaggactcaaaccccaagttcaccctgtgaaacattcccatttcctaaacccaggcaggctcatggccctcagcctctcagaccccatggaaacctcctcccccacttcacgggttctctccatattgagagcctcccctcctcggcacacaacccagagactcaccccaacatgtgtagcaaatcaccctggaaacaatcatggctgaacgtggtagcccatgcctgtaatcccagcactttgggaggcccaggaggtggatcacctgaggtcgggagttcgagaccagcgaggccaacatggtgaaacctcgactctactaaaaatacaaagttcactgggcattgtggtgtgtacctgtaatctcaactactcaggaggctgaggcaggagaatcacttaaacctgggagacagagattgcagagagccaagatcgcaccattacactccagcctgggcaagaagagtgaaactacatctaaaaaaaaaaaaaaaaaaaggaaaaggaaaagaaaaaaaaaatcatgaggcaacattgcatttaacaatattttatttatcaaaagacacttgtctttctcaggtaagtgaaggtctagagatgaaacgagtcccgatgtaaattgccccatgggcattgctgagatcacaagatcatcactgcagcatgcagcacaatagtaaatttctcaggatggaagttcaacaatccaaaaggtagtattttttttcatgatgctcagtccatcatacgaaataaaaataaattccttttcatgatcatccattcagtagaaaaaatgatagtaaatttgttctcatgaagatttttaccgtaacatataggatttatcgttattattattattctttgttttttgtttttttgaagcggagtctcactctgttacccagtctggagtgcagtcgtgcgatctgggcacactattaacctccacctccagggttcaagcatttctcctgcctcagcttcccgagtagctgggattacaggcatgcgccaccacacccggctaattttcgtatttttactagagatggggtttcaccgcattggtcgagctggatttgagctccggacctcgggtcatccgcccatctcagcctcccaaagtgctgggattacaggcgtgagccaccgcgcccggcctcaatttatcattattcacgcatccacaaactgggttcttatattttgtacgtgattttttccattgaggagagatatctgtgcatattcatgctgctcatatttcatccacaaactcggttcatatttcatccacaaacataattttttccgttgagaagagatacttgtacatatttatgctgttcaaattcacatttcatcattcttttacaagaaatagataatgtattttaaggttttccagtggtattacagatattttactgggtgtatagatagaaattaaaccaaacttctttgttctggccgccagtcatgcatcctgttttcaacatagttcacatacaactggttgtgtaaaaatgaaattattttgtttagtacaatcatcaacagttggttgattagatttttaattatcaagttaatcattgtcattatgcttctcatcgcactcgtcattaattgctgtgggaggaaatttgttatgttccctatgagagggtgtatcacaaattcaaataagaattcaacgacaatggactgtataaaggaaataagcaagtccatggaaaacatatttttttccggaaaggattaaaatatttttaaaaaggaattaaaaaaaaattgggcacggtggcaaatgcctagagtcccagctgctcaggagatggagacagaaggattgcttgagcccaggaataagttggaggctgtagtgaacagtgattccaccactgtactccagccagggcaatagagggaaaccctctttctaaaaagacaaaaagaaacaaaacaaaacaaaaaaacaccacatcaaaaaacccaacaacaaaatgaaaaaccaaataacagcaatacaattggagctattcgatccaaagaagtaaatgaaacataaagcaaataaaagagaaaagctaatacctgtgtcctgcaggactcagtccaagttctgctctgactccctcctggtgagccaccccttaaaaagtcacttggggcggggttactttgacagacagtcttctgtcaaagagggaggcggtaaatagcacttttttttttttaatttaacgcctttccaacaaattagcggctatgttgtctaagagtgcaaatgtcagaggtgggtacaggcagcaagaccctccccacaggggcagcagaaggaggaatgactaagggaacaagactttagtgtgctcaactacacaggacaggaaacagatgctttttacaaaagctggtggacttgaaggcagaatattttcaagttcctgtaactgcgaactatgacctgtagcctgtgagagtgactttctgtggcaaaggagcttttgtgaatgtgaggaagttaattatcttaacagtgggaggttctcccggcttatctagctagaccctcgtgaaatcccaagtgtccttaggaaggggaagcagagagagatttgagtccagaagaggaagaaggtgatgtgaggcccagtaggggaacaaagggcgatggcatgtaaacacttagcccccagaagtgggagagggctggggttcatcacaccagaatccctaacaatcagccttattttaattacccttgaaatggaaggaggccttagagagccagaggcttggaggggcaccctctgctgcatacacagatcccaactgctgtgggctccaaataattgcaccagggaaatcacaaattatcaaaaataaaggatgtaaagcttttaaaaaatattaaaagcccaacaaataaaaaaagttctaaatctataaaattgacctcagtctgtatatttagatgagtcatgtgtatatagcgtttcacttcaaaatatatgataaatctctcattcattggcttaaaaataaacacttcaatcaagtctttatcagaaaaattgaaacgttaactcaattgccttttagttcatgtgactttacaaaacttaaaacaataaagtcagttttaaaaattattagtaaagtaaaagaaaaatatcttcacaatgtagacattttgtccacatgagacatgtgaaatattgccattactaaatatttgcaggtcaaaaactgtttccaaaacattttaaataatcatctggcctgtctgttttagagcattcaattctagctgaggtctggggacatgtgaaaggagccacggcccgactccgtgctgggaagagtcagacattttccacagctctgtcctttgctgtgggctctgcaactcctaccaattaaaattgcttacgtttttgttttatttttactaaagaggggttcctaaaagctaacattatactgagtatatgtaactaaaactactaagaaaacaatttcacaattatacaaatgtgccaagtaaatgaaaaaataaactgtattttaataaaggttataaaaagaaaaacatatagtggtgtgaggactgtctcaggtcttcactgagcaagggatcatgacattctatggcggacagctgaccttggctttctgctcctcttgattatgtctactaagtgacatacttactctttttccacctgtcttgcctctaagggtaacaggttttatgagatccctcctagtgctttgcaggtcagcctccctttgctgcattccaattttactgcctataccctccagctggcttttgatgacaaaagtcctggtcccagccattctcagattctgtcatccccgtgggcactatggagctcagcactatgggaggttccccaaaaatctcgttttctatgaggaatggccaccacctgcatctcagtgatgctagtgacccctttcctactcctgtgctcactggtcctcatgaagatcctggttggtctgtagccccctatttttcctattaaagagaaattacagtaagacccatttgtgtgcaaaatcaattttaggcttattacacttggcctgataatttgcataaaatgcagcaagaattcatcggccatataggctacttttgagttaattttcctgggtttttacctaaaaatatactattttggttagagtcttgtgaaaataaccaatgtgttcaattgttttattttaaaaggctcttactgaacactataaatatgtataagttgaatatacaaactatattgtcataaaatcacaacccaaaatgtggagaacgcagagggaaaggtaaatttgctcgcaaaaacatacttcacccaaataactggaaaaaaaaaaagactttcatgacccttctttaaccagagcagcagctttcaaacaaggtgtttgccttggaaatgccattcacaagccaaacggcccttgagagctgtctgtcaggcactgtagaatctagcagctcctcacagagttagaaatagtttcaggaaagagattccctgcttttagtaactgcactttatattcccagatagcgagattgtatgtaaaccatttttatcttattctggaactcttttgggtactttttttttttttttttaaatgatggagtctggctctgttgctcaggctggggtgtagtggtgcgatttcagggtatgagaaaatgcagctggacctggctctttccaggaagaccctcacagccaaggagtccaaagcctggggttttcatctaattccagtgtgactggggtaggagcagctttggtgctgggtgtgtgtgtgtgtgtgtgtgtgtgtgtgtgtgtctatgcctgtgtctgtttagggtgttaggctcgtggttgtctagatacaaatgtcccagggctcaggagccccagggttatgtcaggggcaccagatgaaggtgtcaacagaagttagggcacaagggacaaaggtgagagcaaggttagattcatttaggtgcaagaaatcatagagggaggagggagaggaagccctcctgctaccaccgaggaagaagcgcagcttaaggcagaaagcctgtccggagaggaagtgagtttgagggcagggctctctgggtaaagtacggtctgggacaccagcctgggggaagggtacagaatgcagagtggcctggcgtggggactaagaacagaggagagcagctttcactgggagggtcagtgttttcagtgtccagcactgagcaaggtgagatttgggcagcttgctgtgaaataaggtcaggctctggcattgtccccattgcgtgtgtgtgtgaggggcactttgggagagtgaactctccacctccatcctctcatacgtccttcaaccgagcttgccagttaccctgattccaaggagatctatttattgttgacaatactggatcctagcagaggctgggtaggagcctgggcacaagcaagtggaggagggggcctgggcctgaaagacctgggaggtttgagagaggacacagcccacagaatggagcagatggggtagagtcggcaagcattcagggctcctagtaagttggacaatggagaccctgaaagatccagtaaaacggggagaacaaacaggtccccaactcacatccttgcagtgcctggagcttcagactccagacaggtggggaaggaaaattgagggatgtgaacatgttggagaatgtcgtgccctgaagaatgaagaaaaggggggtgaggaatgagagcaggaacggcttccagtgcctggtgcccaggagaactcagaaaatgggtgtggtggagaggaatcgaggaaccggaagtggtggaagtgtgcagggcccctccgagatcactgtgactgccaggcgtcctccctggctggagagcttcactgtcctccttcccagccaaaatgtgtcccttgaaagcttcctccccaatggactggttctgggtcctatatatttgaaggggtggcctgcctctccacacctgtgggtatttctagttgggtgggaggagagacagagaaaagaaataagacacagagacaaagtataaagaaacaacagtgggtccaggggaccagcactcagcacaccaagggcctgcaccggcaccggcctctgagtttcctcagtttttattgattattattttcattatttcagcaaaaaggaatgtagtaggagagcagggtgataataaggagaaggtcaatgaaaaacatgtgagcaaaagaatctatatcataattaagttcaagggaaagtactatgcctggacgtgcactcaggccagatttatgtttctctccacccaaacatctcagtggagtaaagaataacaaggcagtattactgcaaacatgtctcacctcccgccacagggcagcttttctcctatctcagagttgaacaaatgtacaattgggttttacaccgagacattcagttctgaggggcaagcaggagacagtggccttcctccatctcgactgcaagaggctttcctcttttactaatccacctcagcacagaccctttatgggtgttgggctgggggacagtcaggtccttctcatcccatgaggccatatttcagactatcacatggggagaaaccttggacaataccccgctttcaagggcagaggtccctgcggctttccacagtgtattgtgcccctggtttattgagactagagaatggcaatgacctttaccaagtatactgcttgtaaatattttgttaacaaggcacatcctgcacagccctaggtcccttaaaccttgatttcatacaacacatgtttttgtgagctccaagttgggtcaaagtggctgggtcaaagtggctggggcaaagctacaaattaacaacatctcagcaaagccattgttcaaagtacaggtctttttcaaaatggagtctcttatgtctttcctttctacatggacacagtgacagtctgatctctctttcctttccctacatatattcatggaccacagtcttcaaggagtccatttcctcactgtttttggtttgatttctctgaaattaggaaatgccccattgaggcacccaggattgtctttacttcccccagagcttccactcctgaggcaggagcttctcaaacaccccccaagactcaacacctaatttcaccctctgaaaccttcccatttcttaaatccaggcagggtcatggtccttagcccctcagatgctgtggagaccttctttccctttcatacattctctcaagattaaaagccacccctcctcagcacacaccccagagactcaccccaacatgcattgcaaatcaccctggaaacagtcataagaccacactcatttaataatattttatttatcaaaagacactctttctcaggtaagtgaagttctggagaggaaaagaggagtcctgatgtaaattgccctgcaggccttgctgagatcacaaggagattgttactgcagcttgtagcacaatagtaaatttcttctctggatggaagttcaacaatccagatcgtagtatattccttttcattatgctcagtccagcaaatgtgatgataacaaattccttttcatgatcatccattcagcagagaaaatgtttgtaaatgtgttttcatgaagatgtttaccataacatacaggatttaccattatcaatgcatccacaaactctgctgttgttttttatacataattttttccatcgagaagtgatagttgtacatattcatgctgttcatatttcaaccacaaactctgctggtttttttatacgtaattttttccattgagaagtgatacttgtacatatttgtgctgttcatatttcatgtttcatcatccttttacaataaataggttatattgtattttaagtttttctaactgtagtgcagaaattgtactgggtgtatacatagatatcaaaccaaatttacttgttctggctgataatgcatcatttatttcatagattatgtatttctttgacacatttcacgtacaactaattgcataaaaatgaattttcttttagtatagacatcagcatgtgcttaattcggaatttaattgttgagttaaacatcgtcattgccttttccgttgttattaattgctctggtgggaattttgttatctcatacataagacagtgtgccacaatatctcttaaaatttcaatggcaataaactttatatttaaaaacagggaatctatggaaaacacatttttttctaaaggattaaaatatttttttaaaataattttctaaaaagttaggcacggtagcaaacgtctagagtcccagctactcaggaggctgagacaggaggattgcttaagcctacgagttgggggctgcagtgaactgtgattgcaccactacattccagccagggcaatagaagttaaccctttttctaaaaaaaaaaaaaaaagaaagaaagaaagaaaaaaagcaacaacaccaaaacctcaccaacaaaatggtaaagaaaaaaaaaacagcaatacaatgtaagctatttgatccaaagaagtcaatgaaatttaaaacaaatgaaagggaaaaagtaatacttgagtcctgcaggactcagtccaagttctgctgtgcctccctcacggtgagccacccctttagaagtcacttgggtcataagttaacccgataggaagtgtcctggccaatgaactagggaggtggtaaatggcaccattttaaatttaaattcacggccttttcaacggatcagtagccatgttgggtaagagtgcaaatgtcagaggtgaaaagaggcagcaggaccctcccctagtgcttgggcaacagaaggtggaatcactaaggggacaagactttagcatgctcaagtacacaggacagaaaacatgctttttacaaaagctggtaaatatgaagagggaacattttcaagttcctgtaaccaagaactaccgcctgtaaccggtgaaagtgactttctatggcaaaagcgtttttgaaaaggtgaggaagttaaatatcttaatgttgggaggttcttctggtttatctggctagaccctaatggaatcccaagtgtccttatggagcggggagcagagagagagatttgagtccagacgaggaagaaggtgatgtgagtctgggtgcgggacagggggagaatgatgctatgtggggatctgggctggggaatgacttagctgcatgagcggagtgacttagactcctgaactagaagaaatctagggctcatcacctcagcagccctaaccatcaaccttatttttattacaggtcttccatcgacggactccctaaaaagccagcggcgtggaggggcgccctctattggacaaatagatcttgactactttcggccctcaaatagcctgactaggcaaataacaaataataataatttttttttaaatcatggaaaatattttaaaaaacaattaaaaagttataaatctataaaatctgcttctgtctgtgtgtctgtatatttagatgtctcatgtgtacataatgtttcactaccaaaatatatgatgaaaccctcattaatcggcttagaaaactaaacacctaaatattttctcagaaaatacaaaaactttaactcaaatcccttttaattcacctgactttaaaaatctttaaaaaataaagcatgctttaaaattattagtaaagtaaaattagaacatcttcagaatttagacatttggtttaaattatacaggtcaaatactgcccttagtaaatattttcaggtcataaacaactcctgtaatcttttaaataattgaattacatgtctgttttagagctttaagttctagctaaagcctggggacaaatgaagggcaccatgccccctctctgtgctggaaagagacattttctacagctctgacccttgcagtaggctttgcaactgctacctatcaaaattgcctacatcctaagtttattattaaaaggagttgcttggagttaacattataatgaatatatgtaactaaaactatttctcatacaaagtatatgaaaaagtagaatgtatttttaataaaaagttataaaaagacatgaacatgtagtttttataaaaaacagtaattttgtctagttttgcagttctaaaaagttatgttaaattcaaaaataaaaaataacaagacaagactcaaggtttaaataagttgtaaaagatttgtaaaaattagttctataaaaattttacaaaaaaaagcattggttaaaatttaaggaattattttgtttttacagaaattaaacattcattaaaaacactctgatacaaggccttaatttgggttcatgtatcagaatagcagggttttcttagaatattaatctattctttaaaagaactatgaatgttatgcaaactttataaaaatcttaccttagagtcaaactgattaaaattccatagattttacgtaaaattttattaaaaattaacttcaacaaaaataaaatttgattttctcctttaaacaaaagttttgcgtaatattaaataataaagcatttttgtttaccttttaaactataaacacacacacacatacacatacaccaacactaaagtcagctgacctcatactgtctttattggatattcttgtttaaaaaactatcttctttggaaaataaagttttttattttaaaccatattttaaattatcattttgactaaatccataacatacagtgatctgtaataattctattttataatatcaagtgttttgaagaactccaggaacagccatgagagaacactgtggtttagtaacactttatttcctcagtttgaaaatagttgtctttcttggggaggccggtttcagcagatgaaaacaagagtcatgatgaaaattacccagcagtggttagtgtgaccataggaacattgtcatcaggtcagcagaaaacatatcagcaaatttttctcatactggcagtgtgtaggggtggatgtttacagttcctgaagccccagtggtcgtgtggtcttttagttttgccatttataggcaacttgtggtaactagctcaattagacacattccttatcacaaggacagagggctttctgtatcctagggttcttgccttggcattccagaagaatcaggtcacacgtggacgtggagaatgagtgcaaggttttattgagtggaagtagctctcagcagatgggggagccagaaaggagattggtttctccctggattggggccgttcagcagccctggctctcctctgactgccccaggcaaaatccacatcgttctataagtcggtgccctgctggtgtgctggtgcctgttgtcatgttcctcttcatgtccagccgcctgtgtgttcctccgctgatgtgctcctctcgacgtcaagcctcctgtgtgtctgactgctagggtcttggggtttttataagcacaggatgggtcttagcaggccaggatgatcttgggaaagacaacattcggtcaggaaaacaaaaatgcctgttgtcatctaggtccgtggggacaagcccaggtgtggagcttttagccagggaccacagcctcctgtatccaacacttcccttcaccttttctatatcattcaaagggatcatgcccttcccatcccagcacttcactttcatgtcatttgccccctctgaagaggtacatctaactgccattagaatatggatgatgaccagtcttagctgcttcctgctgaaagggggcattgttttgggggaaaacggcagtcagattcctcccaggggtctctataataaaagatcgaggtggctactttcaggaggtcctctaatgtactatctggtcccaagtcccatttctgcaacctcctcctgatgtcaggagctgcctgagtaataattttatcctttaggattatctgtccctcgattgaattaggagatagagaggtgtgatttaccaaggcctctcttagcctctccaggaaggcagtgggattttcatcaaatccctggttaattatggacaacttagtataattgagaggcttggtcttagacctacgtaagccctctattatgcacacctgaaagtgtctcctcttccagtcttccatctcattattgggatcccatttagggtccttcactggtgctacttctcttccagttggataatattcgctcccttccctgatgctataggtgatgcaaagctcatccccaaatctctctgctgctggcagagcagcctgcttctcagtgtctatcaggttctgactcaaaagtaacataacgtctctccaggagagttcaaatgttagggtgaaattctggaaagcttctatatatctatcagggtcatctgaacacttgcccagatctcccttaatttgctttaagtcttgtagggaaaagaggacttggaccttactgggcccaaattcactgggcatctgtaggaggggcaagagtgagactgggcttgtttgggatgaagatttctaggaggggccaggtgagaggctgaagctggatacggaggttggggtggacccagaggagcagggcttgagggagctggcacgtcagctgggggtgcgtctgggactcgtgtctttaattccctgggcttgaccctggcagccttccccgagacagcaaacaggagggctggaacaatcctacatgtcagcaaaggtctggattgctttgcaaggtatagaaagcctgcacatttggggcctcagaccatgtgtcctcacatccagagaaaagttctaattgcaggatggtattgaaatgaatggtcccttcctgaagccaagccagtccttcctgtaaaccataatttggccaaacctatgtgcggagggctatgagatgcttttcctctggattctgagggtcaaaacagtcccaatggttcaggatacactcaaggggagtacaagctgggggtggtgaggagaactggctgcccattctgaaagacagggaatagaggtgttcctcatttcccttccttcttttggcaaaaagctcagggtgtgatggggagggaaagcaagcatcttcacttcactttccacctcttacccctgcgccctggcaaccttggcaggtgccggccacaggtacaaatgcggtatgtacccatgaagcagggagaacctggagattaggaattaactgccctcacctatgtttccttttctccctgctgttgaaaaactttgagttccctgggcctttttatcccatgaggcatggcctccttctgtgggatggggttcagtcagcaggaattggtcctgtccatttacattgtgcctgttgcctggctttgaattcctcagacctgctttctctttctagggcctcagcctgaagcttggaattgagtttgggactgaaaaagcatttcagaggctgtttatatccatttagtgcctcaaataagccctgctgaatttgcaattatcagccagcaggggtcactcctctgttaacttccctattagaaacagagcggtggggattctcacttagaaaagaaaaaaagagaaaaacagttaaagaggcaaaaagtggggaatgctgggggaagaaccccttgcttagtgcaagtgggcccctctaatccttataactttcccatccttcccccagttcagaccaggttgaattccttggccatggaaggaaaggttccattgatgcagtgggtgagaagcactctgtagggtcctggctaccatcggttttctcacacccccctcatcccaggcagtggagggagacacttctgcgacattgctccccctgccccttcatggctattgggtgtggcctttgcctgctgcaggcatgcctaggtgctggagctgggagggaaaagggtaaggagaggtgccctggaagccgctcatgcctggggctgtcaaggtggaggcatacatggcacctctaggaaaaattggtctgatttgcacctttggcggctgagccaaatgctcattttacttagtaacattgcctcagcctgtagcaaaactcttaacattataaaggaagagataagatccatttcaaataatgtgtgagagagaaaagagatgaaaggaaaacagagtcttttacctgcaggaaagggagagaagtggcagagttttggaagaaaggcaggcccaacagtttcccattcactcacactcaccttccgagatcccagacgagccaccagttgaaatgggaaaagtttccttgtccccctcacaggaggtggagtgggggtgtggcttgcttctttagtactccgctgctcaaacctctagggaagcatacagactggcaagttgtggggctacaaccccatggcagcatctaggggtagatgtttacagctgctgaagccccagtggacatgtggtaccatgtgctcttttagttttgccatctataggtggctttgtggtaaccagctcaattagacccattccttaacccaaagacagagggctttctgtatcccgcggttgttacctaggtgtaccagaaaaatcaaatcacacgtggtcttggagaatgagtgcaaggttttattgagtggaagtagctctcagcagatgggggagccaaaagggagaatagttttcccctgaagtcgggttattcagcggcccaggctctcctctggctgccccagccaaactctatgtcaatccattggtcggtggcctgccagagtgctggtgcctgttggtggattcctctcagcgtcgagagtttttccctctcaggaaagggagagaagtggcagccacccatgtgttcttgcactgatgtgctcctctcgacgtccaacctcctgtgtgtctgcctgctagggtcccagagtttttttaggcacaggatagggcatggtgggccagggtgatcttgggaaatgcaacatttggtcaggaaaacaaaaatgcctgtcctcatctaggtccaggggcacaagcccaggtttggagccctagccagggaccccggcctcctctacccatcactttccttcaccttttctgtatcattcaaagggaccatgcccttcccttcccagcacttctcttctgtatcaataggtgatgtttttaaaatttcccaactctagtgcaggcatggtactagacatatacatagaaataaaaccacacttattcttctggctggcaagacatagtatttttgccaaattatgtgttgttttgaagcattttatgtacccctggtcatataaaaataaagctattttgttcagtacaaacagcagcattttctggattagaaagttaatcatcttaaaagatcatcacggatttttccattgcactcatcactaattgctttggcaaaaaatttcttatctcacgcatgacaaaatcagccgcagtatctcctagtaatttaatggtgatgatctttataaaggaaataagcacatcaagggaaaacataattttttttaaaaaaagagtaataaaactttttaaaagtcttttttaaaagactgcttttctaaaatagtaaaataaaactccaccaataaaaccaccaacaaaacagaaaagaaaaaataatgatatgatcggagctatttgatgaaagatggtaaattaaatttaaaatgattagaagagaaaaagcaatacctgtctcccgtaggtctcagtccaggttctgctatgcctttctcctggtgagccacctatttaagagtcgcttaaagcatatgttaatccaacaacagcagattaaaaaccaatgcaatctgaactatttgatctaaaaacataaataaaatttaaaacaaataaaagagaaaaagcagtacctgtgtcctgtaggtctcagtccaagatctgctctgactcccttgtggtgagttagccctttagaagtcacttggggtggggcatatgttaattccactaacattggttctggccaatgagtcaggaaggtggtaaatggcaccttttcttcttgctgatttctttcagttcctttggagtctggacattagtcctttgtcagatgcctagtttgtgactactgtttcctatactgtgggttgtgtgtttaccctgctgatatttcttctgccttgcagaagattttcggtttcattaggtcctattgatcttattctatttttatatttttgcgtttgcttttggggcattagtcatgactacttggcctaagccaatgtctagaaaagctttttggatgctatcttgtagcatttttagactttcaggtcttagatggaagtttttatatgctttgttaaagatcaggtgactgaaagtaccgggctttgtttctcggttctctattctgttccattgctctatgtgcctatttttatacttcctgcaccatttattgaataaagtgtcctttccccaattagtgtttttgcatactttgttgaagattagttgtctgtaagcatttggctttatttctgggttctctattctgttccattgctctatgtgcctatttttatacttcctgcaccatttattgaataaagtatcctttccccaattaatgtttttgtgtactttgttgaagattagttgtctgtaagcatttggctttatttctgggttctctattctgttctattgctctatgtgcatattttataccagtatcatgctattttggtgattgtagccttgtagtataatttaaagcctgccttcagatttgttctttttgcaaagtattgctttggatatgcggtcacgtttttggttttgtataaattttaggattcttttttctagttctgggaaggagaatgatgatattttgatgagaattctactgctctgtagatggctttggagagtatggtcactttcacaatattgattctacctattcataagcttataatgtgttcccatttgtttgtgtcaactgtgatttctttcagcactattttgtagttttccttgtaggaaacttacattaacctacttggttaagtatatttctaagtattttacttattaaaaattctcagggaaatgcaaagtaaaactgaggtgggaaattaaagaaaaataaaattaaaaagaaagggaaataagctttcttgtattaagctaacttgtcccagaggcagcaacaggcacagcccagacccaggaaaagtcttgataatattatttattgtattctggagactcttccagcactccttcaatgtagggagaagaaaaacaaattttcctttgttttatggtatgagtttatagattcttgttctctttaactagtaacttcaagtattctgttttatctaagaagtatggcaaaggtcatgagaagcctgagcaggcctgaactacagctctctaggcaccatagtgaagataaaccaatgcaagcctctttagagcaaaacctagataatagacatctgggttgcatagcaacagttatgtgcaatcctgagttatgaacctgttacaatttgattaactgtctttttcctgcctctgtatccctgctttcacaccactgtaagcttgcttcaagctggcccacccccttttgtgaagtgtgtataaaagtcaagtgctgtctttgttccaggccctgtctttggacgtgagtctgctgggcctgagagcactcaataaaagattctcctgttttaacccaaagcctctctctcatcctcctaaatcccacaacaaaaccacaatgagatgctatcttaatcttgctagaagcccataatttaaaagtcagaaaacaatagatgttggcatagatgtggtcaaaagggagcactttgacactgctagtgggaatttaaactagtccgaccactatggtaaacagtatggggattccttaaagaactaaaagtagaccattcattccagcaatcccattactggctatctacccaaaggaaaagaagttattccataaaaaagacacaagaatatggatgtttatagcagccgattcgcaattgcagtgatatgggaccaacttaagtgcccatcaacgaacgagtggataaagcaaatgtggtacaccatggaataatacttgataataaaaaggaacaaaataatgtcctttgcaacaagttggatggaactggaagccattattctaagtgaagtaactgaggaatggcaaatcaaatattgaatgttttcacttttaaatgagagttaagctatgagaatgcaaaggcataagaatgatataatggacttggggactcagggggaaaggttgggagggggatgaggaataaatgatgacatattgggtatattatacactgctcaggagacagatgcctcaaaatctcagaaattaccactaaggaacttttatccacataaccaaaaaccacatatattccacacactattgaaagaaacataaacattattttaaaaaataaagccacttttaaaattagcaaaataaaataaatatgtcttcagagtttagatattggatccaaattagacagatcaaatactgcctttactaaatattttcatgtcattaacaacttctaaaacctttcaaacagttttttgacatgtcttggaaccatccatttctagctaaggcctgggcacctgtgaaatagggccatgcccccccttatactgggaagagtaagatatttcaagactaagatgttttctacagctccatctttttctttaagctctacatcaaggacataattaaaattggttgtctcctaagtggtttactaaaaatgcatacttaagagttaccattataattaatatttgtatctaaagctacttaaaaattttcacacacaaatctgactgaacaagtaaaatatattttaagtcaaagtttataaaaggacatgagaacatagcttttatgaaaaaattagttttgtcaagtttagaggttttcaaatattttaaattcaggaaataaaataacaaaaagacaaaagaaaatggttgaacaacttagaaaaggtttgttaaaattcatcttataaaacaatctacatgtaaaaagtgggctaaaatttgaaagagattatttaggttttccataaattaatccagaaggggtaggaagtcttaagaatgaggaaggacaggaggaaggggaggtcatcctgacactgcagaggcagaagtgcagctgaaggtatgaaggctaagaggggaggggagtttgagtgctgctgcctggctgtcagagcagaggagggtcctgggcaccagacttgaggaagggatgaaaatgctgggcagacctgtagtgggcccttgagatggcagatagtggtttccagagagagggccattgttttccagtgcccagcactgagcagagagagttttgggcagtgtaaaaaaaaaaagagaacttacctctttctcgttttagaaaaagaacagtctaagaatatcagcagggaaactctcagtgcttcaaggggttaaacgcccttttggctttcttgtgttggtttcatcatagaggaggagaaacttcttggaagtgttcctaaaaacacaacacgtctgcttctcctttcaaaaaaggaagtgctaaaacacgaacactctagatccaaatattaatacggatgtctaaatgcttccgttttccaaggggcagaaagctaaaggttgtaacctattcatttcagtcaaagttggtgaaagggaagcaaaggaactgggtggggcttggaaggatgacgaagctcaagctcattggccagcaacctctctcctgggggcgggaggggtgagcatacgtcattgctttggcttctataaaatgaggaggactcaccgagtgtgaagagtccttctggtgattgcagctgagagcacactcacgacgttctgcaaggattctctgattatgattctgaagggaaaagcgatggaatggacagcagagattgtaattttctttatcttgaattacggaagaaagtatctaggacagaaatccacgacaagtccttggaaccagcagatctcttcgttcacggagacgttgacgtattctctattgaagaagattcttaccttcttactggacaaggttttgtcagttctgcgtgactggattgtccgggagactctgaggaaactgatgtcacatgtttttccaaagaagatgtttctggaaccaacaactgtgattgtggtttgaggacttctgagagttccagtacaggaaataagcagaacatcagctggaggctaaacggatccagacttcactcttcacttcccttcctattcagtctattgtgcctgctgactgagaagcttggctggtatgtgagcaaataaacggaactattcagaaggagatgttgacatattctgtattgaagaagatccttatcttctcacctgacaaggttttgtcagttctgtgtgactggattgtccggaagactctgaggaaactgatgtcacatgtttttccaaagaagatgtttctggaaccaacaactgtgattgtggtttgaggacgcctgggagttccggtatgcgaaataagcagaacatcagctggcggctgaagggatgcagcctccactcttcacttcccttgccattccatctattgtgtctgcctgactgagaagcttggctggtatgtgaggaaataaacggaattataaacaaggagattgtttctcatctacttcattctgttgtggcttttctattttggggttcagggtgtgtgacaaggaccaaggagatgaaaggtttcatgatggagaaagcccaggcaatcagattgaagagctatccacagggaatcttggctgctgaggggctgcaccctgcaacggactgaccatatgacagaaaagggttttaaaggctcaacttctggactgagaacccagagtaatttgggaacctcctctgtgaggagatatgaaagctgggaatcatgacatccctaggaatggaaggcacatttcctgatggaaggggtgctttggaaaacaggagcagagtagacacagcagccttgtggatacgggtgggcagcatgcatgggtgatgtgaacgtggagtgtttgtgatcgaaactcaaaatgtctgacaaagtgaaaacctagaaaccacaatgaggaggaagagtttgtgagggcaatcactctccccatgtgtgaaaatcgggggctcttaaaatctcatctggagaggtgcagtctaccaaactctgggactttagcctccccttttaaaaaaccgtgcatcaataccaacgtccgaaaccacagaaataacacctggcttgcatggagacaaggacaaaaagccgtcatgatgagttgttctgctcacttgctgcctctgttcagtgcacaggatattgtccacccactagcaggctactgcaagagaagtgtgcaatatgttccctatgtgccatatatgtgccatatggcccatatgacaactgagtcagaaaatatctgatgccctcagagttacactccacctggagcttgcccccagccatccaggacctaggctccctaccctgtccaattttctggtgttttgggggcttcattctctaaggtgtgcccactctttactcaaaccaaaacacccacatattcctgcccatgaacaaccaatcaaccacttctcagttccacatcctgctgttgggtctctagtggtgacactgtaactcccaggtcatagtggtgacactataacacctagctaaattgatgccttgtctctaggaggccatgggctcctgcaggtctcatctgactctctgtagccttccctgacaatgctcacaatacccaagccagagccacattgacagcaagctgctctcatcttacctttgccagacctggccactggaaaaggctgaccctcatcctgcaatgcctatacctccaacctttgtctcaagctggtgtcctggagggacttctaagcagaaaacagattcagactcccatcctctcctgaatggcctcatatccaattctcagaccctcagccttcattgtaaggacacttcatccatgcccttgagtattctgtctgcactgtgtattctgcaatagattctcctccctctgcgaccctcaactccttccgcagactttttgttttcttgatcatctaccatagtcttccactgggacactgccaagcccattctggagagtgagttgtgcaagtacactgccccccatctacctttcgggaggtgtatacacccttctttctcccaggtctggaggctttctattttcatcctgaggcatctccacctgctcttggattcttcaaattgacaaccaccagttaacaagaactatgtgtcaccaaatagccaaacaatggcaattacaaaaataaaattaatagctgtaacccccattagcaaggatacacaaatcaaatcagggatagtgggtgaggaagtctgcctaacattcaaggaaggattctgaagtgatacaaaatcattgcctttgctatctttagaatggacactttcagccaggcacagttgctcagcctgtaatcccagcactctgagagccccagttgggtggatcacttgaggccagcagcttgagaccaccctgggcaatgtgcagaaaccccaactctactaaaaatacaaaaatagccagttattgtggcacatgcctgtaatcccaactccttgggaggctgaggcacaagaatcacttgaatctgggagccagagtttgtaatgagcgaagatcatgccactgcactctagcctaggcattagagtgataatctgtctgtggaaaataaaaacattcctcttcaaagttttcttctttaaatcataaatgttggaattaatatatcctctttgaaactcactttcttcaagcttctttatttgatggtagtaaatctttgttaagctttatgaggcaagagtaatggaagaagcatattatatatatttatactctaacctcagtgcttgttctagcaagctcaggcatgcgtgaatgtgcccaggcatgttccagcccataccttatatcctttccttattgggaaatgctgttactcctataagcattcttgtaagcaacttcctctttttctttgtctccactatctttacctattgaggacagttttaggttcttagccagttggatgtagcatagactgtgaggtccaaccccagccaatggagatagcacacagcagtagcgacctcatgcttaacagataaatattcctgtctccctttgtttggggtgctctcagctgatgagcaacaccctttctaaagaaattaaagttgtcttgctgagaaaacttttggtctaaatgctgattcttccttgcagcactgaagaagaagcaattatttccaacactttctcatacacaaaaaaagaagaaggtggaagaaaactttcttgtgcaccctatccctcactcagaaagacaacagaaggctcctagtggcaagccctagaggattcatttcttttgggaaccctcttggctgggatactaggactcaggtcaaactcagcattttcagtgtgtgggaagtgtgcttgggtttcactgttacttccaataatgtgatttggtccttggggttcaccaaattttggtatggagtggtgaaccctgttaagtttaagtgtctataaaattaacaaagcaaaataaccattctgccccatggttcagagaccaaatattgtgtaggaaatgctttagcgagagaaacagagaagaataaaaaatgtcctcaagcgctgcattatttcttgttatcgtccagatcttagaggaaaggctttcattttccctcattcagtatgatattagctgtgcatctgtcatttatggcttttattatgttggggtatgttccctgtgtatgtagttttttcagggtttttgttatgaagtgatgttgaactttatcaaacgtttttcagtttcagttgaaacgatcatatgctttttgtccttcattctcttgatatgatgcatcatgttgatgatttccatatggtgcactgtccttgcatcctgggcatgaattccacttgatcatgacaaatgaatttttaatgcattcttgaattccgtttgctggtattttgttgaggatttttgcatcaatattcatcagagatattggcctgcagtttctttttttttcttttttctttgttttgttgtttgtttgtttgtttgttttgatgtgtctatgtctggttttggtatctgggtagtagtgttccatccccttttattttttagaataatttgaataagactggtgttggttctttaaatatttggtagaattccgaagtgaagtcattgggccccgggcttttctttagtggaaggctgtttattatggcttcaatctcgttacttattattggtctattcatgttttgaatttgttccttatttaatcttggtaggctgtgtgtatctaggaatttgtccatttcttttagattttcaaatttattggcacataattgcccattgtagcctctaatcgtcatttgagttcctgcagtaccaattataatgtctccttcttcatttttgattgtatttatttggatcctgcccctttttttcttacttaggctgcctaataatttcttaattttgttgaactttttcttttgtttgtctcgctctgccaccaggctggagtgtagtggtgtgatcttggctcactggaacctccgtctcccaggttcaagcaattctcctgcctcaccctcccaaatagctgggactacaggcaagtgccaccactcccagctaatttttgtatttttagtagacacgggttttcaccatgttggccaggatggtctcgatctcttgacttcataatccacctgcctcagcctcccaaagtgctgggattacaggcatgagccactgcgcccagcctaattttgtttaaattttcaagaaatcaacttcttctttcattgatttctgtattttttatttccattttatttatttaaactctaagctttattctatcttcttctcattttagctttggtatgcttattgcctctctagctctttaatgtgcattgttagattgtttatttgaagttcttcctctctacaccataagacgtaagcatgtcctcattatgtcataagatgtaaccacttacagctataaacttccttcttagttctgcttttgctgtatctcataggctttgttatgttgtgtttccattatcaattgtgtcagaaatttttcaatatttttcttaatttcttcattgagcaactgatcatttgggagcatatttttaaacttccatgtacttacatagtttccaaaatacctcttgtgatcaatttctagttttattccactatggttcaagaagatgcttgatattatttcaattttttttcacattttaagatgtgttttgtgacctaacatatggtctactttttttttttattaaactttaagttgtggggtacatgtgtagaccgtgcagttttgttacataggtatacacgtgccatggtggtttgctgctcccattaacctgtcatctacattaggtacttctcataatgctatccctcccctaacctccaccctctgacaggacctggtgtgtgatgttcccctccctgtgtccatgtgatctatttttgagaatgatccatgtggattagaatgctgtggaaaagactttggattcctaatatccagggagggagacgatgatattactttcaatatcacacgggtgtacacactctctgtgacattgttcctaatatccagtggaagagaggatgatataacacccagggagggagaggatgatattactcttaatattgcagggtgtgtacccatgcctatgatattgttcctaatatcaggagggggagaggatgatattactcagaatatggcagggggtgtacacacactctgtgacatggttcttaatatacaggggagaatgggacaatattactctcaatatcgcagggggcgtacaaccctgtgatttgttcctaatatacaaaaggggacagtatgatattgttcctaaaatcgcagaaggtgtacaacgccctgtgatattgttcctaatatccagggcgggagaggatgatattacccccaatatcacagggggtgtgcactttccctgttacattgttcctatgatccgagtggggggaaatgacattagtcccaatatcgcaggatgtgtacactactcccccatgatattgttcctaatatcaagggggagagaggaggatattactcccaatatcgcaagggaggtacatcctccatgcaatattgttcgtaatattcaggaggagagaggaagatattactctcaatatcgcagaaagtggacacccaccctgtgatgttcttcataatatccagggaagcagacgattatatgactttcaatatcgctgggagtgtacatcccttttgggatattgtttctaatatccaggaagggagaggattatattacttccagtattgcagccagtgtacacatttcttgtgatattgttcctaatatccagaaagggaaaggatgatattactcccaatattgcaggtggtgtacacccccctctgatattgttccttacatcaaggaaaagaaagaagaatattactcccaatatcgaagagagtgtacacccctcctgtgatattgtatttaatatccatggggaaagaggatgttgttactcccaatatcgcagggggtttacacccacactgtgatattgttcctaaaatccagtgaaggagaaaataatattgctcccaatattgcagggtgtatacaggccctcccccgttatattgctcctaatatccagcggtggagaggatattactttcaatttttgcagggagtgtgtaccccctctctgatatttttctaatatcaaggatgggaaaggatgccattactcccaatatcgcaggaggtgtacatgccctgtgatattgttcctaatatccagggaggtagaggatgatattactttcaatattgcaggggctgtacaccctctatgatgttgttattaatatttaggttgggagaaaatgatatttttcctaatatcctgggaaggaaaggatgatattactgtaaatattccagggagtgtacaccttcctaatattctaatattgttcctaatatccaggggtgggagaggattatattactcccaatatcgcagtgggtgtacacccctcctgtgatgttgtttctaatatccaagcgaggagaaaatgatatcactctcaataccgcagggggtgtacaccttccccatcatatcgttcctaatattcagagggaaagaagatgatgttactttcaatatcgcaggggttgtacacaacccctgtgatatttctcctaatatccaggaagaaagaggatgatattgctcccattatagcagacggtatacgcctccctgtaacattgtttctaatatcaagactgggagaggatgatatcacttccagtatcgcaaggggtgtacacctcccccgtgatattgttactaatatccagggggaagaggataatattactttcaatattgcaggggctgtacacccccgtgatattgttgttaatatttaggttgggagaaaatgatattagtccaaatatcgcagagagtgtacacacttccgataatattgttcttaatatccatgggggagacgatgatattacacccaatatcgcagggggtgtagtctccccttgtgatattgtccctaatattcagggaagtaaacgatgatgttagtgtgaatattccagggagtgtacaccccctttgtgatattgtcctaatatccgcaggagagaagataatattactcccaatatcgcagggggtgaacacaccccctgtgatattgtttctaatatccaagcgaggagaaaataatattactcccaatgtctcaggggatatacaccttccctatgatattgtttctaatattcaggtggaaaacgggtgatattactcctaatatccaggaagaaaggggattatgttactccccttatagcagggggtatacacctcccctgtaatattgttcctaatatcaaggctgggatatacgtggggggaaggatgatattactcccaatatcacaggggttataaaaccttctgtgatattgctcctaataaccatggcggaagaagatgatattactcctaatattgcaggaggtgtacactcccccattatgttgttcctagtatgcagaaaaggagaggatgacattattgccaatatcgcagggtgtgtacaccacccatgatattgttcctaatatttagagggacagaggatgatattactcccaatatcgcagggggtgtacacgcatcccctgtgatattgttcttgaaatcgaggggaaagagaattatatttctctaaatattgcagagggtgtacaccgccccctgtgatattgttcctaatagccgggggcggggggagataattaaattactttcaatatctcagagagtgtacatcccccttgtgacattgttcctaatatccagagcaaaagagaatgatattcctcccagtatcgcaggaagtgtacatttaacctgtaatattgtttctaatatccagggggaagagaatagtaatactcccaatatcgtaggggttgtacaccttttctgtgatattgttgcaaatatttagaagagagagagaatattactcgcaatatcacagggaatgtatacttcccctgtgatattgttctaatatctagaaaaagagaggataatattactcctaatattgcagggggtgtacacccccacttgtgatattgttcctaatataaaggaaggtcgaaaaacaaacggggagcccagggggaaggaaggcaggcgaggaagaggcagcgccggggcgccggagggagcagccgggccgcggaagcgcgagcacgagaccggtcgcggtcgcagtcgcatttttgccgttgtcgcggccgccgccgccgaggcttacccggggatgtctgagcccgcgcctcgcggcccccaagctccacgctgcgcccgctgtcccggcctctaagggccgccacgtccctgcggcgcgcgcaggcagaaagcggcttcgtgccggcggagggggcccgggcgggccgggaaaggctgccccaggccccgcgcctaccccatcaccgcggccggcgccgggccgggaggatgagcggtgtggggctctgaagcatggagggggttttgtacaagtggaccaactatctcacaggttggcagcctcgttggtttgttttagataatggaatcttatcctattatgattcacaagatgatgtttgcaaagggagcaaaggaagcataaagatggcagtttgtgaaattaaaggtgacagctttggaggggaccacccttgattggatacataaattctgttcattcagcagacaacacaagaatggaattaatcattcctggagagcagcatttctacatgaaggcagtgaacgcagctgaaagacagaggtggctggtcgctctggggagctccaaagcatgtttgactgatacaaggactaaaaacgaaaaagaaagaagtgaaaccagtgaatcgctgaaaaccaaaatgtctgaacttcgcctctactgtgacctcttaatgcagcaagttcatacgatacaggaatttgttcaccacgatgagaatcattcatctcctagtgcagagaacatcaatgaagcctcttctctgcttagtgccacgtgtaacacgttcatcacaacgcttgaggaatgtgtgaagatagccaatgccaggtttaaacctgagatgtttcaacggcaccatccggatcccttagtttctcctgtgtcaccttctcctgttcaaatgaggaagcgttctgtcagccaccctggttcttgcaccagggaggagtagccactgtataaaagaaccagtatctgcacttcaccgactctcccagcgacgccgaagaacctactcagatacagattcttgtagtgatattcctcttgaagacccagatagacctgttcactgttcaaaaaatacacttaatggagatttggcatcagcaaccattcctgaagaaagcagacttatggccaaaaaacaatctgaatcagaagatactcttccatccttctcttcctgaagaaactgtagtgtccaactttctctaagtattgctatgcaaaagctgctgtaattgaactattgttatagggagtagttttttcccttaggactctgcactttatagaatattgtaaaacagacaaacaagaaaacaaaccacatacttttgaagcgtgttttatctttatatagtttgtttgcaagagtattttcctaataacttcacagtatgaatgtgcatcttttttttctttttttaacaaatgatggtgtaacattttgacatccataaggacaaatgtagatatttttctaaaaaaccgtgaggggactgacagcttggtcagggtgtattgtagcttataaacatgaaatcttacaaggtttcagtttgacagaagtgtgatatatgtaacttgtgccatggaccaaatggtcactttaccacagctaaaaatgagttatgatagcagcttgatggtgattgcattgtattcctttaatcaaaaaggaaacgcaatattctaagtatctttagcccaaataccatgacatattgagcatctttaaataaccagactgtattgtccttcatatgtgaagttgacactactgatttgtcaataccaaattttgggttaaagtgtttaatttttatttatttattttcttgttgcctcaaaagatgattgcattctaacttttgtgacctaccaaatttaagatgtgtatacattgttctttacgttgttctagaaaagagattttaatgctgtagtgacttagctcacttacatcagagaaataaacaactttcaatggaaaaaaatatatataaaggaaggaagaggatgatattacttctcatatagaaggggttgtacaccccccttgtgatattgttcctaatattcagggagggagaggattatattactcccaatatagcagggagtgtacacccccccccccgtgataatgttcctaatattcagggaagcagaggatgatattactttcaatatcacagggggtgtgctgtccccctgttatattgttcttaatattcaggggggagaggatattattatgcccgatatcacaggagaagtacaccccacaagtgatattgttcctaatatccaggggtaaagaggatgatatcgcaggtggtgtacacccctccccgtgatattgtttctaatataaagaaggagagagcatgatattactcccaatatcgctggaggtctacaccccccttgtgatactgttcctaatatccaggaagggaaacaatgatattgctgtgaatattccagggggtgtacacccctttgtaatattgttcctcatatccagggggtagagaggatgatattactcccaatatcgcagggggtgcacggccccactgtgatattgtttttcatatccaggaggggagaggatgacattactctcaatatggcagggggcgaacaccccctgtgatattgtgctagttaggttgggagaaaatgatattactcccaatatcgcagggggtgtacaccgctcctgtgatattgttcctaatatccatgacgggagaggatattactcccaatatcgcagggggtgtacctctcccctgtgggattgttcacagtatccaaaagggaagaggatgatgttactcccaatatcacagggagtgtacaccaccattgtgatattgttcctaatagccagggaagaaaacgatgatattattgtgaatattacagggggtgtacacaccccctgtgatatggtttttaatatacaggttggaaaaggatgatattactcccaatatcacaaaaggtgtacacacccccccatgatattgttcttaatacttcggtggggagaaaatgatattagtctccatatcacaggggtgtgaactcctccggtgatattgtttttaatatcaagaggggaggagatgatattgctttcaatatcgctgggggtgtacatccctcctgtgatattgttccttatatccaggcgaggggaaaataatattactcccaatagtacacaccccatgtggtattgttcctaatactcagggggaaagaagataatattactttcaatatcacagggtttgtacacctttcctgtggtatagttttcaatatccagggggaaggtacatgatattactcccattgcagcaaggggtgtacacacctcctgtgatattgttcctaatatccagaagtggtgaggatgatattactcccagggggtgtacaccccacctatgatattgtttctaatatccaggggaaaagagtgtgatattatgcccaatatcgcagagggtgtacacttatcctgggatattgtttctagtatttggggagggaggagaggatgctattattctcaatatcgcagaaattgtacacccccgctgtgatattcttcataataatcagggaaaaagaggatgatattactaccaatattgcagggggttacacttcccctttggtagtgttcctaatatccaggaagaaagaggatgatattaatcccattttccaggaagtgtacacccaccgtgtcatgttgttcctaatatccagcagggaagaggatgatattactcccaatatcggagagggtgtacacttcccctgttatattgtttctaatacccagggggaagaaggatgacattactgccaatatcacagggtgtgtaccccaccctgctattgttcctaatattcaaaaggaaagatgaaaatattactcccaatatctcagggtgtgtacacctctcctgtgatatcgttcctaatatccacaggaagagagaatattactctcaatattgcaggggggtgtacacccccctgtgatattgttccaaatattcgggcggggagaggatgatattagtcccaatatcgcagggggtgtgcaccaacctgtgatattgttcctaatatccatgcgggggaggacgatatcactctcaatgtcgcaggaagtgtacacctctcttgttatatttttcttaatatccaggagggaaaagatgatattactgccaatatcgcagggtgtgtccaccccccttttatattgttcctaatatccaatggaaaagaggatgacattgctctccatatcccagaaggtgtacaacgcccctgtaatattgttcctaatattttgggggaagagaggatgatataacttataatatcacaggaggtgtacaccacccctatgtattgttcctaatatcctttaagggagaggatgatattactcccaatatctcaggtggtgcctattccccctgtgatattgtttttaatatccaggggaagagagtatgatattacgcccaatatcgcagggggcatacaccctctctgagatattgttcataatatatagagggagagaggatgatattacttccaatatcagaggtggggtacaccccccggttatattattcttgatatccaggaggggagaggttgatattactggatatatagcagggagtgttcacatcttctgtgatactgttcctaatatccagaaaagtagaggatgatattactcccaatatcgcagaacgtgtacacctccctgtgatattgatcctaacattcaaaggggagaggatgatattactcaaaacatcacagggcatgtacactcccctgtgatattgttcctagtatccagaagggagcaagataatattactttcaatatcgcagggggtgtacacccctctttggtatgtttcctaatatccagaaggaaagagggtgctattactttccatattgcaaggggtgtacacccccctgtggtatggttcataatatccagggagggaaagggtgctattattccccatatcgcgaggcatgtacaccctgctgcggtacggttcctaatatccagggggaaagaggatgctattacttcccatatcgcggggtgtgtacacccccgtgtggtatgttttgtaatctccgggaacgaagagggtgttattacccctcatatcgctggaaatgtacactcccctgtggtacggttcacaatatccaggggattgagggtgctattactccccatatcgcggggggagtgcacctccctgtggtatggttcgaaatatccagggtaagagagggtgctattattccccattttgcaggaggcgtacacccctctatggtatgttttgtaatatcccaggtaaggggtgctattgagagaagagagcaaaagaccccccccatattgttctgtattattttatactcagtacctgttttaagaagaaacaaggaagcgaaaccaaaggcaggcagcccggcgccaggcaccagatccaaaaccagacccgaaaccaggcctgggccttcctgaccttagcctgaaagttaaaattcaacccatgacctagcaactgatgttatccatagattccagacattgtatggaaggacattgtgaaatttcttgttctgttctgtttcactctgagtactggtgcatgcagcccttgtcacatacccactagattgctcaatcaatcatggccctttcatgtaaaaaccttagtgttgtgagcccttaaaaaggacagaaattgtgcactcaacaagcttggattttgatactctagtctgctgatgcttccagctgattaaaagccacttccttcactacctcggtgtctgtgggattttgtccgcggctcctcctgctacactgtgactccccttatagagaggggtgtacacccccctttggttcctaatatccagcgggggagtaggtgctattactccccatattgcggggagtgtacacccccttgtagtacggatcgtaaaatcaaggagggagagaaggtgtaattatccccatatcacagggagtgtacacccctttgtggtatagtttgtaatatccacgacgggagagaatgctattactccccatatcgtggagggtgtacaccgccctgtagtatggttcgtaatatccggaaggggagaggttgctattactccccatatggtgggaagtgtacacccccatgtgatatggttcataatatccaggggggtagaggatgatattacccacaatatcatagaaggtgcacacccttttgtgatattgtccataaaatccagaaggggagaggatgatattacttccaatatcacagggggtgtgtagccccatatgatattgtttgtaatatcaaggtagggagaggatgctattccttacaatagctcaaggggtgtaaccttcttgtgatattgtttgtaatatccagaaggggagaagataatttttttattttaaaagtaaactttaatgtcaaaaatgcaaacttgagaagggcagaaagatcaaacagaaggctgccacttcacaattggagggttgcacagtggccgggcagaggcgctcctcactccccagacggtgaggcagccgggcagaggtgctcctcacttccgagatgttgcaggagccgggcagaggtgctcctcacttcccagaacagggggctgccgggcagaggtgctcctcactgcccagacggtttgcaggcctggcagaggcactcctcacttcccaaacggagcagcggcaagccagaggcgctccacacttcccagatggtggggcagccgggcagaggcgatcctcacttctcagagggtagggcggcccagcagaggcgctcctcacttcccacatggtggggcggcaggctagaggcgatcctcacttcccagacggtggtgtggccatgcagaggtgctcctcacttcccagatggtgtggccgccgagctgaggcactcctcacttccctgacagtggggcggctgggcagaggcgctcctcacttcccagacacttggactccgggcagagactctcctcatttcccagatggtggggctgccgggcagaggcgctcctcacttcccagacggttcagaggccgggcagaggcgctctggggagaggataatgttactcccaatatcgcagggggtgcacactccctgtgatattgttccgaatatccagagggggaaaggatgatatagctcccaaaatcgtggggagtgtacacccccctgtgatcttgtttgtaataccaagaagaaaagagaatgctattatttccaatatagcagggggagtacaaccccctgtgatattgttcgtaatatctagggggagagaaaattatattagtcttaatatctcaggggacgttcatccccctgtaatattgttggtaatattcagaatggagaagatgatattgttcttaaaatacaggaaaaaatatgataatattacttccaatatcgaagggggtgtacactctcctgtgatattgttcccaatatccagaatgaaagaggatgctattactcccaatatcccagggagtgtacacccctttgccatattgttcataatatccaggggaagacaggataacattactcccaatatcaccgggggtgtccacccactagtgatatttattgttcatcatatccagaaaaggagaggatgatattactcccaatattgcaggtggtgtacggtccctgtgatattctttgaaatatctagaaaaggagaggatgatatcactccgagtatcacagggggtgtacacccccctgtgatattgttcgtaatatccaggggagaaaaggatgatataattgccaatatttcaggggatgtgcacctccctgtgatattgtttgtaatatccaggggtggagaggatgatattactcaaaataacgtaaacatcctgtgtgtacatcccctgtgatattgtttataatatccaggggggtagaagatgacattacccccaatatcacagagtgtacacacccctgggatactgttcataatatccaggcgggaaagaatgaactacttccaatatcgcaggatatgtacacccccctgtgatatatttcctaatatttatgtgggtaaggatattacccccaatatcacagaaggtgtacatcctctttgtgatattattcctaacatccaggaaaggagagaatgatattactcccagtatcgcagggggtgtacaccacccctgtgatattgttgctaatatccagggggagaggataatattactcccaaaatcacaggggacgtacactcctcctgagatattgttcctaatattcatggggaaaagaatgctactactccaaatacagcagagggtgtacaccatccccgtgatattgttttttatatccaaagggtgaaaggctgatattactcccaatatcgcagggggtgtacaggccccccatgatatcattcttaatatccagggaggcaaagaatgatgttactcccaatattgcaggctgtatacaccccccgtgatattgttcctaatatccagagtaagagaggatgacattgctcccaatattgcaggggttgcacgcacgccctgtgataatattactcccaatatcaacagtgggtgtacactcctcctgtgatattgtttgttatatctaagaaagaagaggatgatattactgtcaatatcacagaaggtgtacagccccttgtgatgttgtttctaatatccagcggtgagaggatggtattactcgcaatattgtagggggtgtccaacggccctgtgatattgtttctcatattcaaaaaggaaaagaataatataactccaaatatcgcagggtgtgtacacttccctgtgatattgatcctaatatccaggaagagagaggatgatattaatcccaatatcacagggggtgtacatcgcttctgtgatattcttcctaatatccagggggggaggggatgctattactcttaaaatcgcagggaacttacactcccactatgatatttttcctaatatccaggaagggagaaaatgatattactcctaatatcacatatcacaatgggtgtacatctccccgtgatattgtttctaatatcaaggatgggagaaaattatattactctcaatatcgcagggggtgtgcacacctcctgtgatattgttcctagtatccagcggaggagatgatattactttaaatattgtagaaggtgtacaacccccctttgatattgttcctaatatccagggggaaaggagatgatattactcctaatatcgcaggggctgtacaaccctatgtgatattgtttcttctaatatccaggggtggagaagataatattactcctaaaatcgaaggggacatacactccccctgtgatatttttcctaatatccagaaggaaagaggatgatattactcctaatattacaagaaatgtatacctgtcctgtgatattgttcctaatatccagaggggtaaatgattatattactcccaatatcgcaggggtgtacaccttccctgagatattgtttctaatatgcagtggaggagaggatggtattactcccaacatcacaggagatgtaaactccccttgtgatattcttcctaatgttcaggacgaaggagggtaatattactcactgtattgcagcagggggtgtagagccccctgtgatattgtttttaatattcaaggttggagaaaataatattccttccaatatcgcatggggtgtacacccttctttttatatagtttctaatatctggggggagaggatgatattactcccaatatcgcagggggattacacccccactgtgatattgtttttaatatccagggtgggagaggataatattactccaaatatcccagggctatacaccctccgtgtgatattgtttctaatatccagaggaagagaagatgatattactcccaatgtcacagggtgtgtacaggccttctttgatattgttcttaatatccatgagggagaggatgatattactcccaatatcgcaaagactgtacaccctttctgtgatattgcttccaatatccagggagggagaggatattacactcaggatcacagggggtgtacaccccaacctgtgatattgtttctaatatctagggaaaatgagggtgatattactatcaatatcacaggaggtgtacactcccttatgatattgttcctaatatccaggagaatgacaggataatattactcccaatatcgcgggtggtgtctccccccactccgtgatattgttcctaatacccagagggggagagaatcatattactcccaatatcgcaggggatgtacacctacatccggcggagtagaagataatattactcacaatatcgcaagaagtgttcaccttccctgttatattgttgctaatatccagggagtgagaagatgatattactttcaatactgagcgtgtacactacccctgtgatattgtttctcatatccagtagaggagaaaatcatgttactcccaatattgcaggggtgaacacctcctttgtgatatttttcctaatatcaggaaagggagagtatgatattacccttaatattgacaggggtgtacacccccctttgatattgttccaatatccaggggggcagaggataatattattcccaatatcgcagagggtgtacaccccccgtgatattgttcctaatatccagagaaataaaaaatagtattatttccaatatcacagggcgtacattttccctgtaattttgttcctaatatctggggggtggggtggcaggataatattactctcaatattggagagggtgtacacccccctgtgatattgttcctaatattcagggtgggagagaatgatgttactcccaatatctcaggagtcgtatacacccccttgtgatattttttctaatatccaggaggcagaggatgatattgctcccaatatcgcagggggtatacacccgagctgtgatattgtttctaatatgcaatatgggggaaggatgattttactttcaatatcgcagggaatgtacactttccttgtgattttgttcctaatatccaggggtggagaagatgctattactatattactcctcatatcgcaggcggtgtacaactccctgtgatatggttcagaatatccagagtgaaaaaggagggtgacattactcccaatatcgggggggtgtacacccctttgtgatgtggttggtaatatccaggggggcagatgagggtgatatcactccccatatcgtggaaggcgtccacttttttgtgatgtggttctttatatcccgaggggagaaggtgatattactccccatatcgcgaagggcatacacccccctgtgatatagctcataatattccggagagtggaggaagatactatgccctatatcgcgggtggcctacaaccccctatggtttggcttataatatccaggggggagagggtaatattgctccccatattgtggagacgtacagccccctgtgatatggtttgtaatatctttggggggcgagggtgatattactccccatatcgcggggagcatacacccccgtgatctggttcatagtatctcaaaggaagaagttgatgtgtacaacttaagggaaaaagttgaagtgaagtgtacacacgccctgtgacgtggttcataatatccaggcgggggagaggagagtgatatttactccccatatcgcgggtgttgtaaactcccctgtgatatagttcataatatccaggggagagaggagggtgatattgctcctcatatcgcgaagggtgtacaaccccctgtgatatggttcataatatccagaagggtagaggacgatgatattactccacatatcttgggaggtgtgatatggttcgtaatatccagcgatgagagaatgatattactccccatatcgcaaaaggtgtgatagggtttgtaatatcctgagggggagagggtgatattaatccctatattgcagaaggactacaccctcccatgacatggtttgtaatatcccagggggtagagtgtgatattactttccatatcacagggggtgtgatatgattcgtaatattcgaagggggagagggtgacactactctccatatcacggggtgtgtgatatggttcttaatatcccaggggttagaggttgatattaccccctttttggggggtgtgtacaccccctgtgatatggttcgtaatatcccgggggagacagggtgacattattccccatatcgaggggatcgtacaccccctgtggtgtggttcataatatccctagggggagatggtgatattactccccatatcagggggcgtgcactcttctgtggtataattagtaatatccagggggcagaggtcgatattcgtttccatatcatgaagggagtacacttccctgtgatatggttcctaatatccaggggggagagggtgatattattccccatattgcggggggacatacaacccctgtgatatggttcataataaccagaaaagaagagggtgatattaatccccgtattgcagagggcatacaccccccctgtgatatggtttgtaatatctaggggaggaaaaggtgatattactttccatattgctgggtgcagacacccctttatgatatggttcataatatccaagttggagagggtgatattacttcccatatcatgggaggtatacccttccctgtgatatggttcgtaatatccagaaggggagagattgatattactccccatattgtggggggcgtacaccttcctgtgatacggtttgtaatatctaggggatatagtgggtgatattactcaccatatcacgggggttgtaacatggtttgtaatatccaggggaggagagggtaatgttactccccatatctcggggcatgtacaccctcctgtgacatggttcgtaatatccaggtcgggagagggtgatattactcctcatattgccgggggtgtgttatggttcataatatcctggggaaggaggctgctatcactctccacatcttgggggatgtacactctcctgtgatatggttcataatatccagggtgggtgagggtaatattactccccatatcgcgggaagtgtacatacccctgtaatattgtttgtaatagaagagagggtgatattactccccacatcgcgggtggtgcccacccccctgtgatatggtttggaatatccagggggatgaggagggtgatattactccccatatctcggtgggagtacatccctctttgatcaagttcataatatccaaaaggaaacaggagagtgatattactccccatatcgccgggggtgtacacgggagggggagtacacccccggcgatatggtctgtaatatccagggaaggagaggagggtgatattactcaccatatcgcaggtggtctacatttacctgtgaaacagtttgtaatatccagggggggaaatgagaatgattttttttttttgagtctcactgtgtcacccaggttggagtgcagtggcacgatcttggctcactgcaacccccgcctcctggactcaagcaattctcctctcccagcctcctgaatagctgggactacaggcgcaccccacaacgtctggctaatttttgtatttttattagagacggggtttcaccatattggccaggctgatctcgaactcctgaccctgtgatccatccgcctcggcctccaaaagtgctgagattacagatgtgagccaccacgcatggcccaaggagaacgatattactccccatatcccagggggtgtatatccccctgtgatatggttcagaatatccggaaggaaagacagggatattacttcccatatcgcaaggggtgtgacatggttcgtaatatcccatgggggagagggtaatattactcttcgtattgtgaagggcatacactcccctgtgatacagttcataatattccggggagtagaggaagatattatgctccatatcgcgggtggcataagccccctgtggtttggttcataatatccagggaggagagggtaatattactccccatattgtggggacgtacaccctcctgtgatatggtttgtaatatcccagaggggagagagtgatattactccccatattgcagggacatacacccccctgtgatatggttcaaaatgtcttttttttttgaaggactggttctttatttcaaaaagacacttgtcaatattcattatcaaaacagttgcactattgatttctctttctcccaatcggccccaagtagaccacatcaaaggagagtacatattaagccaataagctgtaggatgtacacctaacagacctcctagaaaccttaccagaaaatggggacagggtagggaaagaaactttaaaagatcaacaaactgccagcccacggactgcaggggctgtcacagccagatggggtggccagggtgccacaaacccaaagaagcaaagtttcaaaataatataaaatttaaaaagttttgtacataagctattcaagatttctccagcactgactgatacaaagcacaatgagatggcacttgtagagacagcagcttcaaactcagaaaagggtaatgagatgagtttcacatggctaaatcagtggcaaaaacacaatcttctttctttctttctttctttcaaggaggcaagaaaagcaattaagtgctcacctcaacataaggggaacatgatccattctgtaagcagttgggagggggtagagatggaacaaaattttggtctcagaggtcttgccatcttaatttggtcacttctaatgaaaaaaataaaaaatagaaataacattatccaaaggtatcttaaagctgaaaacttgaacagcacattttttgttgttgttgtttggctaactcctcctggaaccacctttctggcttagctagtactttgtacagagcaatgaggcttcccatagtggagtctccctgggctctgtttggctctcagcaaggcaggcctataccttttcctctcctccatggagagaggaatatgcattaaggtgaaaaatcaccttccaaaagtgagaaagggattcgatcgctgcttcagggctgtggtattatatggaatgttttacaaaaggttgctacaaaacaacaaaagaggtaattacaaaatgtgtacatcacaacatactttttaaagacattatgcattgtgctcacattcccttaaatgttgtttccaaaggtgctcagcctctagcccagctggaatctccgggaagaggcggacagtttggtgaaaaagacacagggaaggagcgggcggcggaaggagggggcggcgaaaggagaaagcagccttccagttaaagatcagccctcaattaaaggtcagcttcgggcaggctggcctcaggcggagtctggttcagagggaggagcagcagcagggtgagactgaggcgttctacatctcattcaggtcaagcagagtctggtccagcatcctttgtgtacagaggtgctcccctttggtgcatttcagtttatcttccaagtcatcaattgtcttttccagcttggctaccgatctctcagcaaactcagcatgggtctccgcctcctttattttatcagtaagaatcttgatctcttcctcatatttgtcttctttttgagagtacttttcttcagcagcactcagacacttcaggttctggtccatcagtctaatctgctcatccatctctcggcaaagggattctgccagctcagctcgttcctctgtgcgttccaagtctccttcaatgatcaccaacttacgagccacctcttcatacttcctatctgcctcttctgcaatgtgcttagcttctctgagttggatttcctggagttccatcttttcttcatcttttaaggcccggttttcaataaccttcttacctctctcactctcatcagcagctttttccgcttcttccagcttttgcagggcagtagccaggtgctcctgagcacggtccagctcctcttcaaccagctggatcccacgttcaaggaggccacctcagcctcagcctgttcccgggcccacctttctccctcaacttctcgctggaggcgctcagctcgctcctctgcatcatctgcctgctgctgcagaacctggatcttgcgcttcaccgcctcgatggtggtgatcccagccatggtgcccacccagctactgctagagctccggttcctgcctcctccgatcggcgttgcagcctcctctcacccttacttccgcctcggttcaaaatatcttaagggaaggagttgatattactccccacatcacgggaagtttacatcccctggtgatatggtttgtaatatcccagggtggatagggtgatattactctccatatcgcgaaggagtactcccccctgtgatatggttcataatatccttggggggagagtgtgatattactccccatatcgcgagggccatatactcctttgtgacatggttcgaaatatcccggtgggggagggggtagagggtaatattactccccatacagcgaagagcatacgcccttctgtggcaaggttagtaatacttcagggaaaagagtgcaatattacttttcatattgcagggaacatacactcccctgtgacatggttcgtaatatcccgggggctgagagggtgatatttctccccatatcaccgggggcctacacctgggtgtgatatggctcataatatacagggagggagagggtgatattactccacataccgagtgaggggttacacaccctcgtgacatgttcgaaataccccaaggaggagacaatgatattactttccctgtcgcgggggctacaccctcccagtgatatggttcacaatatcccggggtggagagggtgatattactccctatatcaccggggggtgtacacttccctgggaaatggtttacagtatccccggggggagagggtactattactccccatatcacgttacatatcagggtacacccccacgtgatatggtttgtaacatcccaggaggaagaaaatgatattactccccatatcgcggtggcatacacccctccccgttaaatggttcataatatcttggggtggagagggtgatattactccccatatcacgtggggcatacaccccactatgatatggttcataatatcccggaggggagagggagatattactctccatgtcgcggggggcatatacacccctgtgatatggtttgtgatatcccgggggcggagagggagatattactctccatatcgtggggtcgtacacttttctgtgatatgattcgtaatatccagacggggagagggtgatattacttcccatattgcgggggcgtacacccctctgtgatatggttcataatatcccgaagaaaagagggtgatattactcctcatatcgcggggaacacacaccaccctgtgatatggtttgtaatattcagcgggggagagagtaatattactccctgtatctcggatggcgtacactcccctgtgatatggttcataatatccagaagaaaagagggtgatattactccccatattccagggaatgtacaccaccctttgaatatggttcgtaatatccaggaggggagagggtaatattgctcccaatatcgaaggaggtgttatacggttagtaatatccagagaaggagagggtgacattactccccacatcgtggtgggtgtgcacccacctgtgatatggttcataatattcaggttaagagaggtgatattgctttccatatcgccaagggtgtacactcccgtgaaatacagttcgtaatatccaaaaggggagagggtgatattactcccatatcgtggggggtgtacacccctctgtgatatggttcataatatccagggtggaataaggtggtattactccctgtatctcggggcatgtacatcgcctgtgatatgattcataatatccagaagaagagagggtgatattaatctccatattgctgggggtgtacaaccccctgttgtatggtttgttacactgagttggggagagggttacattactctcaatatcgagtggggcatacacacttatgtgatatggttcataatatcccagggaggagagggtgatattactccccatatcgcgggaggcatacaccccaatgtgatatggtttgtaatatctacatttttttttttgagacgaagtctcgctcttgtcccccaggctggagtatgatggccggatctcggctcactgcaacctcagcctcccgggttcaagcgattctcctgccttggtcccccaagaagttgggattacaggcgcacaccaccacgcccggctactttttgtatttttagtagagaaggggtttcaccatgttggccaggctggtctagaactcctgacctcagatgatccacctgcctcggcctcccaaagtgctgggattacaggcgtgagccactgcacctggcctggtttgtaatatctatgaagggggaaggtgatattactttccatatcacgggaggcgtacaccacgatgtgatatggtttgtaatatccagggggtatactgggtgatattactccccatatcgcggggagtgtatacccttttgtgatatggttcctaatattaagctgaggagaaggtaatattactccccatatcgcaggggtttttatatggttcataatattcaggaagagagagggtgacattactctccatatcacggggtgtgtactcccccatgtgatatggtttgtaatatccagggaaggagaggttaatattactccccatatcgcagggggtgtacacctctctgtggtttgtaatatccaaagggaagaggatgatattatcttcaatatcttggggggatacagtccccagtgatattgttcataatatccagagggggaggggatgatattactcccaatattgcaggtggtgtacaaccccctgtgatattctttataatatagagggggatgatgatattactcccaatatagtaaacaacctgtgtgtacaccccctgtgatattgtttataatatccaagggtggaaaggatgatattactcctcatatcgcagggggtgtatacccctctgtgacattgttcctaatattcaggggaggagaagatgatactactcctcatatcacaggggatgtacacccccctgtgatacttttggtaatatccaggggaggagaaaattatattattccccatgtcacagagggtgtacaccccgctgtgatagtgttcataatatccaggtgaaaagaggatgatattactccgaatatctcaggaagtgtacacccttctgtgatattgttcataatatccaaaggtggagaggaggatactactccccatatcgcagtgggtgtacacccccctgtgatatggttcataatatccaatgtaggagaggatgatattactttccatatcgcggagagtgtacatccccctgttatattgtttgtaatattcagggagaaagaggatactactactccccatatcacacggggtgtatattcccctgtgatatggttcctgatatccaagagatattataatcctctcttggattatgctacctctcatatcgcatggggtgtacacacactttgtgatatcgtttgtcatatccaaggagggagaggattatattaatcccaagatcacggggggtgtacaccctcctgtgatattgtttgtaatattaaggggggagaggataatattactcccaatataattaacaccctgtgtgtactcctccttgtaatattgttcataatatccaatgggggagacgatgatattactttcaatatcgcagaggatgtacatccctttgtaacaatgtttgtaatataaaaggcaagagaggatgatactacttccaaaattgcaggacatgtacaccccccggtgatattgttcctaatatccagtggggaagaggatgatagtagtcccaatatcgcaaagggtgtacacaccccctgggatattgttcctaatataaaaggaggagaggatgctattattcccaatatcacagaaggtgtaaaatcccctgtgatattgttcgtaatattcaggaggggagaggattatattactcccaatatcacagggtgtgtacacagggaggggcaagggccagaagcgggcgggaatccccatgtttgggcggacccagtttctaatggccagcatttgccaatcaaagcttaccagagaactctaaaagccagggctttcctgctagacaagactcatttctggaactgctttaaaaagaaacaaaacttcccaaggaccccttttcctctctgtctgcctaaaataatgttttaaaaactcctaaagcagctgaattcagcccccttcctgggggaatgtatagacggaactcccacctttcccggcatcccaaggccagagtatgtgaaactcctgggtctctatgtgtgtctgagcggctgctctgccaacactccacacagccctgtgtcctggacccaaggcccttatgacctgagctcaagaggggatctcctgatccatgggttgcaaagatccatgggagaagcatggtttctggggcggggtcacacgctcagtcactgtttccctcggatgccggagatggttcctttggctctctgccaatacagggtgaatcatcatccatccctcttttctttgttctcccgggtcaagttgtttgcctagtcagtcccaatgtgagaacctgaatatttcagttgacgcgctgacttcaaaatccccgggcttcgggaggcggagcttgcagtgagccgagatcccgccactgcactccagcctgggcgacagagcgagactccgtctcaaaaaaaaaaaaaaaaaaaaaaaaaaaaaagtccccgggcttttcttttcactcagtggaaggcagctgcttctaattggccatcttggcccgcccccaccacgtgaccttctgtaaaatgcctccactctccaggaacgctctcattatataactttgcctgaaaccaacagcacgctcattgcacatatcatgggctcatttatttcacttataaagaacctggccaaggaagagatagtgcctaaagtggccagtattctgaccgatatgttagaaaaatggtgtgccgaccaattcatgacatgtgtcccaaaactagcaacggaaattgtattcgccgtgttgaggtctctaatccagatgatgctcatctatgtactggaaaaggcagagtcctttcctgacaagctgctgaaactcttcagaaacatctcatatttcctgaagaagatgatgtctggacaagcagcacaggtcgttcagatttaactttctattcatatatccagcacgatattcgcacaattgtcacgaaaccttaccagttgatgagtcctgcacatttcctttaatttcaggaggaagagggtaatccggatgagttttctgacctactctgctgctgtgattaaacaaccaccaggaaattttgacgacactgttctcctgagctcctccctttcctccgggaacaaaacaattgaatttacaaaaataaagtgttatttgactggagtgaggtctcatgtctgcttatgcggtggctcgctgctcagaacagggtgagtctctgggttgtgtgctgaggaggggaggctctcaatctggagaaaacccactgcaggggacacctccatggggtctgagggactgaggatgaggagccggactgggtctagggaaggaggaggtttcagagggtgaaattctggcactaaagcctgggggtgtttgggaacttcctccttccgaagaagtttcagggagggataaagacaaaccctgggctccttgaggggcccttactaatttgagaggactctatcgggaaggagagtgacaatggcctccttgaggactgaggcccctgaataaatgaggcccagatacagtccatgggggatgagaccttcaagggtcacattttggttgggacagaggaaaagtgcagctctgcagccgcagaggaaaacccggcagtgtgaaagcgaccttggaggggccctgtgcgctctgaatgcgtctgagcccccatcccctgtccccgcctctctttctggattcttccagctcggctgtctccgccatcttctgagcgctccaccctgacttattcaagtttcccttctgccttccaagtactccaaaatctttcagatctgtgtccctacccctgtttttagcatgtgttggggctccaggtccctgaaggtttctggcctgaaatccacctccccagcggagtggactgcgttctagagactccacactccgcgaggttcccaggcccctgagggacaaccgagtggcctgcgcacttcagggctccacactcggcaaggtctttcaagcccttggggtccccttcttagttttttccacctttctgggctgcagtcactccataaatgctgggatctgatccccacccccactctcgtttcctcaattctgcgggctacacgctctggcaaggtcctccgggccctggatcccctccctctccctatgcccacgctcctagtcagcccttctggggtccactattttcaggaactaaccgttctcatggagccttgctaaccggaaagctgtgtggaagaaaggctttgaggatagaggtggagatttggctcttccatagtgccactcacccaccccaccatgctgccactgccagacccggacccctgtttcagaacaagtgaccagattcgctcctggacagccctggacactggccttttctctgaaaactactcaccctttctctagtccccacttcatgccagcctcataccctcttccttcccccacgctggcttccgggatcctcctctgctcagacaacctcttctgtgtcccacccccgtttttagaatgctttggggcaccaggttgggggaaggtttctggcctgatatccatctctttccaaactcccttcttcccttgaaaggcttcttgccttcagccccacttctggctccgaggtttcaggacaccctcctcttcatcctcattcttttgaccaccagctttttaggaattcgaacgtccctctcatcttcgtgaatcctgtccaggcatttgttgaccccttcatctgatacccctgacctcacattgccaaaagtctacccctacccagtacactggaattagacaaaatcccaggagttttacctcaactctgagtgtgcccacaggagctctccctgaagccacgtccttttaagcagggtctagggttcctcccttgtcttaatgaactctttgtcacacggaggacgttatggagcccttatgatctttcactgcctttctgcccagcgttttgtctttccatggacatttataatattttccatggacattttgttctctcaatgtccacccctaatttccaacatcccaaagattctcatgtgtttcctgaaagccatttacaggaatggctgtgcccagacccccttccccaggatcctccttcacacctggtaggtgcctctcctagagagatttgcactcagttgtcgtgcagtcacatggcccagatggttgttaatcacccccttcctggcaacagctagcagccagggaatcactggcacagaaacctcagggtgaccaagatgaggccacctctgtgctgaaggctgtgctccagagcctgcttgggatcaggcttaagcaggtcttcagccagacctgatgttacctggtttccttgagctgccctgcctgagctatcgggagcactccctcaatgcacatcttgattccctatctcatgctctgcttctagaaaccatgagctatcaattgctactggcaatggtcctgggaagtcaaccctaagtatggattctggggttggatgactccccacaggacttcagtgagcaacaatcactgctggcagttggaggacagagtcgctagggcatgtgaccactgtgaaaccaccgatgtttcacctggggtaattttggatgaactacggtagaagcactgaaggtacattgcttttggtttggaagattgtaggtaaataatagcgatatgaatgtggaattggatggctgcaaacgagtgccattgatgcattgaaagaggaaaagtcaggctgtcacctgtcactcagcaatttaaagtgtgagagttgggactagatgtggtggctcacatctataatccagagattcgggggaagcttgaagaggtaggatcttttgagtccaggagttccagaccagcctggacaccagagcaagacctcatctctacaacaaaattttcttaaaaattagatgggcttggtggcacgcacctgtacttgtagatctagctaatggggagcatgagataaaaaaatcacctgagtcagggacttaggggttacaatgaggtatgattgtgccagtgcacacactcccacctggccaacagagtgagattctgcttccaaaaaaataagaaataaatcaggtttgagagttggaaagcatcatcttctcctagagccaaaggacatgtacaactgagacccaggaacaaagcttcatcacaaagagaccatcatcagtggagccgggagatgcattccccctcaccctgccttgaggaggcagtggagtcatctgtctgggatcctttctgacccagccctatttgtttgtctctttggcttctttggatttgtatattttagctgttataacactgtaaaacaaacagagtgatttttttgagttgtgtgaatgatgctagctccatagtcaccctgagagtgatgggaacttttgaatttgtggcaagttggagggtagtgtaagtgacctgagattgccaaattggggctagcactggatgtgaggttaggctagtggaaaaatatgcccagaaccagaggagtgtgggctcactgcaggtggttaggctcagatccaaattgtacagatggatagctttggggtaaagaataacatagttgagaagtgcatgtgttagtctgttcatgcactgctataaagaattacctgagactgggtaattatttataaaactcaggtttaattgggtcatggttccacaggctgtacaaaaagtatgatgctggccatcagctcaacttctggggaggccccagaatagttagagtcatggcaaaaagtacaagggaagcaggctcatcttccacggccagagctggagcaagtggtaggagaggtgatacacactttcaaacaagtaggtcttttgagaactccatcaccggacagcacctatgggatggtgctaaattattcatgaaatatccgcctccataatccactcaactgtcaccagcgcagccagccccacctccaacagtggggattacaattccatatgaggtgtgggtggggacacagctccaacctcaatcagtgggcatcctggattgggtctactatagaaggagaaccaggagctgactatgatcttgaaccctacccatgatggccgggcggggtgactcatgcctgtaaccccagcactttgggaggctgaggtgggtggatcgcctgaagtcaggagttagagaccagcctggccaacatggtgaaaacctgtctctactaaaaatacaaaaaattagaccggcgttgtgctggatgcctgtaatcacaccactacgctccagcatgggaaaaaataccaaaacttcgtctcaaaaaaaaaaaaaaaaaaaaaaaaaaaaagactgcccatgaccactgcaccagtgagagggacaccagcatcactgagatgcaagggctggacattcttcataggtcagagctcaaagcaggggacactgatacagagatgggctccatccatagcaccaaagtggtgagaggatgtgggaatggcagaggccagcactttgccatcaatgcaagggggtataaggaggtgacaccagtgccagagtacatcacggggggactgccctacaatatctaggacttacctcttagagcgtgtttcattagcgacaacagatataaatggcagacaggtgtgtccctgcattaacaggaaatagaaatcatcaagaggaacagaaggcagatgtcagcagccccttagaaagtcatcatccttcatacagttaaaatctgagacagttctcacacgagaaggcctaactcaaaaagaggctgggttctcatgaggcaggtttatgcaaaaccaaggaaggtgtacaagtttggaattctccagtttcccttggaaaagacctacagtcatttgcttaggtaactgagcactgaacaaaggtgagtattgttgtcttttagaagctcttggccaagaaggccttgttggcataaaacccatggtttggaaacatcaccatgacccctgttagagtaatggcctaagggtgggggtcaggaaattgatgtattccttgccaacttctgcctctaagtgagtgaactctgtttgtgaacctctctcctctgtggttatgttcctaggctctcatgtataatcaggagtcatagacttagaaacaggaaaaatacttacagtgtttttgtggcctgtgagctatgacttataattttaggaaaaaaacaattgcaaatggaaagcctaagtctatcaatgctcatccaagacaacataatcaataaaaaccaatatcaaatctcaaggcaaattatttcctgtatatagatggcagagatgagcaccaccatcaaaaactcaaggaccagtgctgtgggtccagtcatctgtttcatggaattcaccagtctggtatcttcaaaatccagaaggatgatggcagatggcaggaaagtaatgcaaacgtcatcaggtgtgaccccactgtagcagctgtgatggatgttttctctcaccatagcaataaataacacaacctcggtcacactgtatgcattgttggtctgcaaaatccatgttttgcaaaactcttcaggaaggtggatctgtaatattggcattgacatgagaacaacagcagtatttattcacaatctcaagctctctgtcttcccgtctctctcattagccatccaagtagtcctgaggaaccaagcccatcagaacattctgcaacataatacacagctccattctccattcaaattttgttgttgttgttgttgttgatgagacaacatcttactccatcagccaggctgacgtacagtggggctatctgggctgactgtagtcttgagcttccaggctcaaggcatcctctcacctcagcctcctaagtggcttgaactacagacacacagcgacatgctgggctagtttttgtatattttgtagagacgtgctctcaccatgttattcaggctggactcaaactcctgagcgtaagtgatccaagcaccttggcctcaaagtgctgagattacaagcctgagccactgcacccagcccaatctccattctactgataacaatgtcattaccaggtctgatggacaggaaatggtaaggtttctgaaaacctaaggatcacacagcgagttccaaaggctgaaagtgcatacctgtcgacactgataccaatgacatccaatggtgagaatgacattccttgtagtcctagctctgctcataacaaatctatactgaagtgtaagagtttgatggtcatggggattttccatgtctctgcctttcagcgatgtgccatatctgtgaagtgttcagaaatgcaacagcctgaggcatgctgggcatatcctctaataaaaaggaaaatgccattttatggtcctgtatttctacaagttggaacacatgggcctgtgatccagatgggggaaatgggaatattcccactcattcaccttcatccacgaagcccatttgaaagctttgggcttcccatccttgtagattttagtgttgtgggctgggtgcagtggctttcacctgtactgccaacactttgggaggcctagacaggtgaatccactgaggccaaaagttcgagaccagcctggccaagatggtgaaaccccgtccctactaaaaatacaaaaattagcaaggtattggggccagcacctgtaatcccagctgctcgggaggctgaggctggagaatcgcttgaacccaaaaggcagagactgcagtgacccgatcctgcctttgcactccacctgggcaagcagaacaaaacttctgtcttgaaaaaaaaaacaaaaaacgaacaaaaaagatgttagagttctgggtttagaggtctataccccagaaagagaatggtttcaacaagggacaaagaagttgctttaaacgttgacttgccatttcttttcagtgtgtttgttctcttgcgtcaagagaccaccagaaaagtggtgcaattactctcctgtcaagaatcattgactatcatctgcaagagggtcagatcctggtatataattagggcagaaatacttagtctgagaagggtatgacatccagaggccctattaatgatgtccttttctccatgcctgactctgaccccatgtgctggactgcccctgtgtggatggcctcatggcctgctcggactctgaggtcccaccccaagtggcacctccatggagggctctactcttgtatgggctctgacactcacactgagacactctcccatggacacctcttcacccacttggggtctgaaactgggctactccatccctccctaacctggaacagagagctttcactgctattacacaagtcatagaggctaactcctcatttttccaagctaattattgaaacattagtcctgggttgataagacaagataagttaacttttcataaatttgcttatcaagttttgaataaattcaaataaattcaccttccccacacaccttagttgtcgacatcacacgcgcacccatactcacagggtgagcacgaaggcttcactgtcagtggagaaagtggcaaaacccttctgtgcctcatcctggtctagacctggccctcatcctttcccactcttcccctcactcccttggattcatccacactggcctcctgcctgctgctccacctccctgcgaagctcacccctgcctcagggcctttgcacgtgcagtggcttcaagccatatcctcttcacccagatctcccagatctcctgaatgatcttcttttatcattcaggtctcagcttgcatgtaatcttctcagtgaggattacccaaaccacatagttcattcattcattcaaatattcattcaatggcatattgacaaagcagctacttcatgccaggccttgggccaggtgttatggatatggcaacaaacaaaacaagagttttctgctctcaaatttttacccacttaaaggagatatcatacatcatctgtaaataaatacatcatctgtaaataatgatgtaaataaatacatcatctgtaaatctgtaaataatgatgtaaataaatacatcatctgtaaataaataaagtataataaaagaaaatagtaggtttttttggttggaggtgaccgtgaagtttgcaaataccatcttacaacacattattttattttatttcatttcatttttaattttattattattatactttaagttttagggtacatgtgcacaacgtgcagatttgttacatatgtatacatgtgtgaagttggtgtgctgcacccattaactcgtcatttagcattaggtatatctcctaatgctatccttcccccctcccccaccccacaacagtccccggtgtgtgatgttccccttcctgtgtccatgtgttctcattgttcagttcccccctatgagtgagaacatgcggtatttggttttttgtccttgtgatagtttgctgagaatgatggtttccagcttcatccatgtccctacaaaggacacgaactcatcattttttatggctgcatagtattccatggtgtatatgtgccacattttcttcatccagtctatcattgttggatatttgggttggttccaagtctttgctattgtgaagagtgccgcaataaacatacgtgtgcgtgtgtctttatagcagcatgatttataatcctttgggtatatacccagtaatgggatggctgggtcaaatggtatttctagctctagatcactgaggaatcgccacactgacttccacagtggttgaactagtttacagtcccaccaacagtgtaaaagtgttcctatttctccacatcctctccagcacctgttgtttcctgactttttaatgatcgccattctaactggtgtgagatggtatctcactgtggctttgatttgcatttctctgatggccagtgatgatgagcatttcttcatgtgttttttggctgcataaatgtcttcttttgagaaatgtctgttcatatccttcacccactttttgatggggttgtttgtttttttcttgtaaatttgtttgagttcattgtagattctggatattagccctttgtcagatgagtaggttgtgaaaattttctcccattctgcaggttacctgttcactctgatggtagtttcttttgctgtgcagaagctctttagtttaattagatcccatttgtcaattttggcttttgttgccattgcttttggtgttttagacatgaagtccttgcccgtgcctatgacctgaatggaaatgcctgggttttcttctagggtttttatggtttgaggtctaacatgtaagtctttaatccatcttgaattaatttttgtataaggtgtaaggaagggatccagtttcacctttctacatatggctagcctgttttcccagaaccatttattaaatagggaatcctttccccacttcttgtttttgtcaggtgtgtcaaagatcagatagttgtagatatgtgacattatttctgaggactctgttctgttgcattggtctatatctctgttttggtaccagtaccatgctgttttggttactgtagccttgtagtatagtttgaagtcaggtagcatgatgcctccagctttgctcttttggcttaggattgactttgcaatgcggggtcttttttggttccatgtgaactttaaagtagttttttccaattctgtgaagaaagtcattggtagcttgatggggatggcattgaatctataaattaccttgggcagtatggccattttcacgatattgattcttcctacccatgagcatggaatgttcttccatttgtttgtatcctcttttatttcattgagcagtggttttagttctccttgaagaggtccttcacatcccttgtaagttgggttcctaggtattttattccctttgaagcaattgtgaatgggagttcactcatgatttggctctctgtttgtctgttattggtgtataagaatgcttgtgatttttgtacattgattttgtatcctgagactttgctgaagttgcttatcagcttaaggagattttgggctgagacaatgggttttctagatatacaatcatgtcgtctgcaaacagggacaatttgacttcctcttttcctaattgaataccctttatttccttctcctgcctaattgccctggccagaacttccaacactatgttgaataggagtggtgagagagggcatccctgtcttgtgccagttttcaaagggaatgcttccagtttttgcccattcagtatgatattggctgtgggtttgtcatagatagctcttattattttgagatatgtcccatcaatacctaattattgagagttttcagcatgaagggttgttgaattttgtcaaaggccttttctgcatctattgagataatcatgtggtttttgtctttgggtctgtttatatgctggattacatttattgatttgcatatattgaaccagccttgcatcccagggatgaagcccacttgatcatggtggataagctttttgatgtgctgctggattcggtttgccagtattttactgaggacttttgcatcaatgttcatcaaggatattggtctaaaattctcttttttggttgtgtctctgcctggctttggtatcaggatgatgctggcctcataaaatgagttagggaggattccctctttttctattgattggaatagtttcaggaggaatggtaccagttcctccttgtacctctggtagaattgggctgtgaatccatctggtcctggactgtttttggttggtaagctattgattattgccacaatttcagatcctgttattgctctattcagagattcaacttcttcctggtttagtcttgggaaggtgtatgtgtccaggaatttatccatttcttctagattttctagtttatttgcgtagaggtgtttgtagtattctctgatggtagtttgtatttctgtgggatcagtggtgatatcacctttatcattttttattgcatctatttgattcttctctctttttttctttattagtcttgctaccggtctatcaattttgttgatccttttaaaaaaccagctcctggattcattaattttttgaagggttttttgtgtctctatttccttcagttctgctctgattttagttatttcttgccttctgctagcttttgaatgtgtttgctcttgcttttctagttcttttaattgtgatgttagggtgtcaattttggatctttcctgctttctcttgtgggcatttagtgttataaatttccctctacacactgctttgaatgtgtcccagagattgtggtatgttgtgtcttttttctcgttggtttcaaagaacatctttatttctgccttcattttgttatgtacccagtagtcattcaggagcaggttgttcagtttccatgtagttgagcggttttgagtgagtttcttaatcctgagttctagtttgattgcactgtggtctgagagacagtttgttataatttctgttcttttacatttgctgaggagagctttacttccaagtatgtggtcaattttggaataggtgtggtgtgatgctgaaaaaaatgtatattctgttgatttggggtggagagttctgtagatgtctattaggtccgcttggtgcagagctgagttcaaatcctgggtatccttgttaactttctgtctcattgatctgtctaatgttgacagtggggtgttaaagtctcccattattattgtgtgggagtctaagtctctttgtaggtcactcaggacttgctttatgaatctgggtgctcctgtattgggtgcatatatatttaggatagttagctcttcttgttgaattgatccctttaccattatgtaatggccttttttgtctcttacgatatttgttggtttaaagcctgttttatcagagactaggattgcaacacctgcctttttttgttttccattttcttggtagatcttcctccatccctttattttgagcttatgtgtgtctctgcacgtgagatgggtttcctgaatacagcacactgatgggtcttgactctttatccaatttgccagtctgtgtcttttaattggagcatttagcccatttacatttaaggttaatattgttatgtgtgaatttgatcctgtcgttatgatgttagctggttattttgctcattggttgatgcggtttcttcctagccttgatggtctttacaatttggcatgtttttgcagtggctggtactgactgttcctttccatgtttagcgcttccttcaggagctcttttagggcaggtctggtggtgacaaaatccctcagcatttgcttgtctgtaaaggattttatttctccttcacttatgaagcttagtttggctggatatgaaattctgggttgaaaattcttttctttaagaatgttgaatattggcccccactgtcttctggcttctagagtttctgccaagagatcagccgttagtctgatgggcttccctttgtgggtaacccgacctttctctctggctgcccttaacattttttccttcatttcaactttggtgaatctgacaattatgtgtcttggagttgctcttcttgaggagtatctttgtggcattctctgtatttcctgaatttgaatgttggcctgccttgctaggttgcagaagttctcctgggtaatatcctgaagagtgttttccagcttggttccattctccccatcactttcaggtacactaatcaaacgtagatttaatcttttcacatagttccatatttcttggaggctttgtttgtttctttttactctctttcctctaaacttctcttctcacttcatttcattaatttgatcttcattcacttatatactttcttccacttcatcaaatcggctactgaaggtattgcatgcatcatgtagttctcatgccatggttttcagctctatcaggtcatttaaggtcttctgtacattgttttctctacttagccattcgtctaatcttttttcaaggtttttagcttccttgtgatgggtttgaacatcccctttagctcagagatgtttgttattactgaccttctgaagcctgcttctgtcaacttgtcaaagtcattctccatccagctttgttccattgctggtgaggagctgcgatcctttggaggagaagaggtgctctggtttatagaattttcagcttttctgctctggtttctccccatctttgtggttttatctacctttggtctttgataatggtgacctagagatggggttttggtgtggatgtcctttttgttgatgttgatgctgttcctttctgtttgttagttttccttcgaacagtcaggttcctcagctgcaggtctgttggagtttgccggaggtccactccagaccctgtttgcctgggtatcaccagcggaggctgcagaatagcaaatattgcacaacagcaaatattgctgcctgatccttcctctggaagcttcgtctcaaaggggtgcctggctgtatgaggtgtcagttggcccctactgggaggtgtctcccagttaggctagatgggggttagggacccacttgagaaggcagcctgtccattcacagagctcaaacactatgctaggagagccactgctctcttcagtgctgtcagatggggatgtttaagtctgcagaaatttctgctgccttttattcagctatgccctgcccctacagatggagtctacagaggcaggcaggcctcattgagctgcggtgggctcctcccagttcgagcttccagaccactttgtttacctactgaagcctcagaaatggtgaacacccctcccccacccagtctgccgccttgcagttccatctcagactgctgtgctagcagtgagcgaggctccatgggcgtgggacccactgagccaggcacaggatataatctcctggtgtgccatttgctaagaccattggaaaagcacagtattaaggtgggagtgtcccaattttcccagtacagtctgtcacgggttccctcatctaggaaaggtaaatcccctaaccccttgtgcttcccggtgacgcaatgccccaccctgcttcagctagccctccatgggctgcatccactgtccaaccagcccaatgagatgaacaaggtacctcagttggaaatgcagaaatcacccatcttctgtgtggatcaggctgggagctgcagaccggagttgctcctattcggccatcttggaatggcaatctatgtttgctttttacatttgaaaaaactggtgtcacgtacctaggtattaatcattgtggtatcctcttgccgatttacctctttatcattaactagtgaccctccttgtcttttgttgttacagtctgtgattttagtctattttatctaatatgagaatagctactctggcacttttttggtttccagcttcatgaaatatccttttccatttccctgttttcatttccctttcggtgtctctatagatgaagttgatttctttaaggcaccataagttgggtcttatttctttatccatttgaccatttagagaatttagaacactgtcagtgttattattcataagtaaaaacttaagagtgggtgtagtggtgtacatctgtatttcctgcactttgagagactgaggcgagctgatctcctggggtcaggagtttgagaccggcctggtcaacatgatgaaaccctgtctctactaaaaatacaaaaattagccaagcatgctggcatgtgcctgtaatccaatttacttgggaggctgaggcaggagaagcttgaacctgggagacaaatgttgcagtgagctgagatcacacagagaagtcatctccactctcctcatcagaacctcttgttcacagcatttgtgagcacaaatcaatgatggttattctttcctactaattagggatattttattacacagcaatagcctccagcaaagggaaccatcatacatgattcctacaagttgacagggctggaattatcactgaaaaactaaggtggctatacttgattcccaatgtccaatttttcatgaatagagaaatttatcctttttccccccagccagaaaccaagttttgctcttacgcccaggctggaatcaagtggcacaatctcagctcactgcaacctctgccccccagcttcaagaaattcaccttttgaacaaggagatattaaggatacactatgtgtatgctaccggtggttgcaggagactcagaaaagagagaaacagtcactggcctcgtgcaactgatattctcgggaggagagaaaggcaatcaagaaagaaacatgctgtatttcagacagctgtaagtcctccacaagaaaagaaagcaggtgaggaacataggaaatgtgtcaaccataaggttcccgctaattctataagttggtcagggatatcctccaagaataagcagcatctgagcaatcacctgaagggaggaaggaaggaagactgtgagtggtggcttacacctgtaatcccagcactttgggaggccaaggagggcagattgcctgagctcaggagttcacgaccactcagagcaacctgttgatacccaatctctactaaaaacacacaaaaaaattacccgggtgtggtggcacgcacctgtagtcccagcttccatgcccagctgatttctctctctccatatatatatatatatacacatatattgtttttgcagagatagggtctcactgtgtcacccagtcatcaagcaattctcttatactgttttggaaaagcatgggaattacaggtgtgaaataccctgctggtcctgaaaaatgtgatatttgggattctctgcctggcttgttttacccaaaataatgacctccagttccttccaggttgctgcaaaagacatgattttcactgttttataactgaatagtattcctgtatgtatacataccacattttctttatttattcttctgttgattgacatgtagggtgattccatgtctttgctactgtaaataatgctgcagcaaatatttgtgtgcattttgatctattcctttgagtaggtacccagtactgcaactgcaggactgagtagttgttatattttttgttctttcagaaatctccatagtgtttgccataaaatctgcactaatttacattcccaacaacaatgcataagatttccccttttctccacattctcactaacatttgttatgtttttgtctttttcataatacccattctgactggagtaagatatctcattgtggtggttgttgatatttttgagacggggtctcactctgttgccagactggagtgcagtggtgtgatcgtggcttgctgcaacctccacctcccgggttcaagcaattctcctgcctcagcctcccgagtagctgggactacaggcgcgtgccaacaggcctggctcattttttgtatttttagtaaagacagggtttcaccatgttggccaggatgatcacagtctcttgagctcatcatacacctgcctcagcctcccaaagtgttggaattacagtcatgaggcagcgcacccaacctcaatgtggttttaatgaccatttctctgacgattcatggtgtggagaatttctttgaaataccttttggccatttatatgtgctcttttaaaaactgactcctgtccaggtgcggttgagcatgcctgtaaccccagaacttcgggaggctgaggccaatggatcacttgaggcaaagaggcagaaatcagcctggccaacaaggcaaaaccccatctttactaaaaatacaaaaaatcagccacgggctgtgactcgtgcctgtggtgcaagttactcaggaggttaaggcacaggaattgcttgaacccggtaggcacaggtcacagtgagccaagatcatggcactgcactacagcatgggtaatagagaaagacctgtctcataaaaacaaatgaataaataaataagataaaaaataaaaaagtctctttatgtcctttgccgactttttaatgggattctttggagttttctgttgtagttgagatctttgtttactctcggtattagtcttttgtcaaaggaaaagtttacaaataatttcttccgttctgcagtttgtctgctcactctgttgagaggattatttctttggctgtgcagcagctttttgtttcagtaaagcttttgaatttatataattaaaattttcagtttggtttaaatttgcactggtcgatttttggttttgttgcctgtacttttgaagtcatactcttgaactctttactagacaataaccagaagagttttctctagttttcttctcacatttttattatttcagtacatatatttaagtctataattcatcttcaattgatttttgtagaaatagtgagaaataggagtccaggtttattcttctgcaaatgacaattcaattgttccagcaccaattattgaaaagggtgtgctttcctcaacgtatattcttatcagctttgtcaaagatcagttggctataaatgtgtggctttctttctgggctctctagtctgttacatcaatctgtgtgtctatctgtatactactaccatgctgtattggtgatgatggctttgtaatataatttgaagtcaagaaatgtgatgctcccagctttgtttatttgcttcagaaaggctgagtcaacagctgcagagatgaagctgcccctcctcgcagggctccttcccggaaaaagatcatggctcccactgaccatataaccatggctggaactcctgaaattcccaaagggaggccctacccagtgaggggggatgaatgaaggtcctacttaaggaatctgtctggccacaatcaggcacagcagctgtgctgccttgtgggggaccagaccacctggattccctggagcctgcaggctagaatgtctgagtccatggaaacacagaaatggaggccgccctcacctccccagaaaactgtagtctcaggcagtctccagccgattgccactggttggctgctattccaagccagtgggtcttaacttgagaggtgctgtggaagtggggcccacggaatgaggctgcttggctccctggattcagccccttttctaagggaatgtacagatggaactcccgccttgcccagctttccaagtatataaaactcctgagtctctgtgagtgtctgagcgagtgctctggcaacattcgacacggctctgtgtatctgacccaagacccttatggcatgagctaatgggaggatcttctgatccatgcgtggcaaagatgcatgggagaaacatggtttgtgggtaggggttgtgcattcactactgcttctcttggctgtaggtgaaggtttctttggctctgtgctgatactgggtgcaccatcacccaccccctttgtttcttctcctgggtcaagtcatttgcctaatcagtcccaatgtaggaacctggatacttcagttcaaggtgctgaattcaccgtgcttttcattcaggggaagacagctgcttctcattgggcatcttggcctgcccacttcacgtcactttttgtaaaatccacaccactccaggaatatccattacttaacttcgcctgaaataaacagaaggctcattacacttatcatgggctcacttacttcgcctataatgaaggtgccatggaaatgctagtggatgacgtggtccattttcttagggatgagatagaaaaatggtgtatggctttttaatttaattaaaatttttagtttggtttaaatttacattggtctctttttggttttgttgcctgtacttttgaagtcttactcgtgaactctttactggacaatgaccagaagagttttccctaagtttcttctgatattttgaccatttcagtacatacatttcagtctataattcactttaaattgatttttgtaaacatggtaagaaataggagttcagatttattcttccgcatatgataatgcaactgtcccagtaccaattattgaaaagggtgtgctttccctagtgtatattcttgtcagctttgtcaaagatcagttgcctatgaatgtgtggctttcattttggattctctcgtctgttacatcaatctgtgtgtccacatttatacctgtaccatgctgtattggtgactatggctgtgtaatatattttagagttaggaaatgtgatgctcccagctttgttcatttgcttcagctgaaaaggttgagtccacaattacaaagatggcagccgcccatccccggaggacctccaacccagaaagagatcaggcttcccaccaaccctataaccctggctggagttcctgaaattccaacagggaggaccttcccagtgaggagggatgaatcaaggtcaaatttaaagaaacagtctggccactatcaggcacagcagcagtgctgccttgtgggggacccctcctgctccagaccagctgccctccctggagcccgaaggctagattgtctgagtctacggaaacagagacggtggccgccccaaccacccagaactcggtagtctcaggcacttggcttgctatcttgccactgcttggctggtattccaagcccgtgggacttgagaagtgctgtgatgatggggaccacaggatgaggctgtctggctccctgtgatatggctgtgatgagtggaggaacaccagggctcatgtctcacacagaattggagaaaatgacacaaacacatgtacagtggttttatggcgtgcagtttaataggcaagaacgaaggaagagctccccatactgagacagagggaggggggctccaaagccaaaagaggaaacccggagtgctgtggataccaatgagttatatgaagaaactggagggggcggtgtctgatttgcatagggttcaggcgattggttcgaccaggcatgtcatttatgtggcccacggaaaaactggccctcccacctagcctttgaatatgcacgtgccggacaccctgatttcctacactcatggggatatatgggggtggccatatcgccaggcacaggtggggacaagggccagaagagggcgggaatcgctatgtttgggtggacccagtttctaatggccggcatctgcagatcaaggttaccggagaactctaaaagccggggctttcctgctagacaagactcatttctggagctgctttaaaaagaaacaaaacttcccaaggaccccttttcctccctgtctgcccaaaataatttcttaacaactcgtataacacctgaattcagcccccttactgggggaatgtaccaacggaactcccacctttcctggtttctcaaggctagattgtgtaaacctcctgggtctcggtctgtgtctgagcagctgctctgccaacactccacacagccctgtgtactaggcccaaggccgccgtgactcagcccatgggaggatctcctgatttcttggttgcaaagatccatgggagaaaaatggtttctggggcggggtcacacactcatggcttctcttggctgtgcaagaaggttcctttggctctgttccaatatagcgtggttcatcacccacccctgttttctttgttctcctgagtcaagttgtttgcctagtcagtcccaatgtgagaacctgaatatttcagttcacgtgcttatcgtgaaattcactgagactttaattcagtggaaggcagcctcttctaattggccatcttggcccgccccctccacgtcacctcccataaaatggccacgctctccagggacgatgccattatatatctttacgtgaaaccgacagaacacttattacactttttgtgagctcatttacttcacttataatgaacatggccatggaaatgctagtggagaaagtggtcgattttctgatggatgtgataaaaaaatggtttgccgaccaattaatgacatatgtctcaaaactagtaacgagacccttaatcgctgggttgaagtttctaatcaagaagatgctcatctatgtattcaacaaagcagcttcccttgcttctgaaatgcttccaaacaacatctcatatttcctgaagaagataatgcctggacaagcagcacaagtcattcaggtttactttcagctcataaatccagcaggatattcgcacaattgttgggaaaccttatcagttcatgagtcgtgcatgtttcctttaatttcaggaggaagagggtaatctggaagagtttcctgacctactctgctgctgtgattaaacaaccaccaggaaattttgatgacactgttctcctgagctcctccctttcctcggggaagaaaagcattgaaactacaaaaataaagtgttatttggctggagtgaggtctcatgtctgcttatgcggtggctcgctgctcagaacagggtgagtctctgagttgtacgctgaggaggggaggctgtcaatctagaaaaaacccattgcatgggacacctccatggggtctggggggctgaggatgaggagctggactggatctagggaaggaggaggtttcagagggtgaaattctggcagtaaatcctgggggtgtttgaaaacttcctccctcagaaggagaagactcagggaggaataaggacaaaccatgggtcccttgaggggcatttactaacttaagaggactttatcgggaagcagagtgacaatggcctccttgaggactgaggcccctggataaatgaggcccagatccagatccagtccatgggagatgagaccttcaagggacatatttttgttgggacagaggaaaagtgcagctctgcagctgcagaggaagccttggcagtgtgaaagcgaccttggagggggccctgtgcgttctgaatgcttctgaggtccatcccctgtccccgcctctttttctggattttttgggctccatggtctccgccatcttctgagcgctccacgctgccaccttcagttttctcttctgggctccaaatactccaaaatctttcatatctgtgcccctacccctgtttttagcatgtgttgggactccaggtccctgaaggtttctggcctgaaatccacctccccagcggtgtggattctgctctagagaccccgcacttggcaaggttcccaggcccctgggggacaaccgagtggtatgtgcacttcagggctccacactcggcaaggtctttcaagcccttggggttccctcctcagttttcttcacatgtctgggatgtagtcactctataaatgccgggatgtgatccccaccccagtgattttttttagttccatgagtgttgctatctgaatagtcatcctgagagtgatgggaccttttgaatttgcagcaagttttagattagtgtgagtggcctgagatcgcaaaactggggctagcattggatgtgaggttaggctggtggaaaaatttgcccagaacctgaggagtgtgggctcactgcaggtggttaggatcagcacagaattgcaaggatgtatagctttggggtaaagaataacatggttcagaagtacatgtattagtcttttcatgcattgctataaagaattacctgagactgggtaattaattataaaaactcaggtttaattggctcatggttccacaggctgtacaaaaaggatgatgctggccatcagctcaacttctggggaggcgtcagaaaacttagagtcatggcaaaaagcacaagggaatcaggctcatcctccatggccagagctggagctagtggtaggagaggtgctgcacacttttgaacaatcagatctttttagaactctatcaccagacagcacctagaggatggtgctaaattattcatgaaatatccacccatatgatccactcaattctcaccggcccaaccaggaccacctccaccattggggattacaattacacatgagatgtgggtggggacacagatccaaactcgatcagtgggcatcttggactgggtctactatagaagaagaaccaggagctgactatcatccttaagactgcccatgatggccaggcagggtggctcatgcctgtaatcccagcactttgggaagccaaggtgggtgaatcccctgaggtcaggagtttgagaccagcctcgccaacatggtgaaaccctgcctctactaaaaacacaaaaaattagatgggtgttgtgccagacgcctgtaatcacagctactccagaggctgaggcatgagaattgcttgaacctgggaggcggaggtggcggtgagccccaatcgcactgctacactccagcatgggcaacaataccaaaacatcgtctcaaaaaaaaaaaaaaaaaaaaaaaaggctgcccatgaccactgccccagtgagagggacaccagcatggctaagatcaagtgctggacattcttcatgggtcagacattaaagcaggccacactgttacagagatgggctccattcatagcaacaaagtggtgagaagatgtgggaatggcagaggccagcactttgccatcaatgcaaggtgggcataaggagctggcaccagtgccagagtgcatcaggggaggactgctttgcaatatctagcacttacctcttagagtatgtttcattagggacaacagatataaatggcagacaagtgagtcccttcagtaacaggaaatagaaatcatcaagaggaacagaaacagatgtcagcagccctcatataaagtcatcatccttcatccagttaaaacctgagacagttctcacataagaaggtctaattcaaaaagagactgggttctcatgaggcaggttcatgcaaaaccaagggaagtatacaactttgggattctccagcttcccttggaaaagacctacaatcatttgcttaggtaactgagcactgaacaaaggtgagtattgttatctttcagaagctgttggccatgaaggtcttgctggcataaaacccatggttggaaacatcaccatgacccctgttagagtaatggcctaagggcaagggtcaggaaattgatgtattccttgccaacttctgcgagacgagtgttggtccactcatctctttcacggaattcaccagtctggtatcttcaaaatccagaaggatgatggcagatggcaggaaactaatgcaaacaccatcagttgtacctccactgtagcagcagtaatggatgttatctcttcattgtaatatccagggagggagaagatgacattattctcaatattctaaacaccctgtgtgtacagcctctgtgatattttttgtaatatccgtgtgggagagaattatattactcctaatatctcaggggttgtgccccctctgtgacaatgttcctaacacccaggaggggataggatgatatcacttttagcatcacagggggtgtacaccccactgtaatattgttcataatatccgggggggagagaatgatattactcccaatatcgcaaagactgtacaccaacctgtgatattatttgtaatatccataagaggaagaataatattactcccaatgtcacaggaagtgtacacccttctgtgatattgttcaaaagatccagttagggaggggatgatattactctcaatatcttaaacaccctgtaggtaagccctctgtgatattcctcataatatccagagggagaggatgatattactcccaatattgcatgaagtctacaccccacctgtgatattgttcctaatatccaggatgggagaggatgatattactcccaatgtcgcaggggatgtacaccttccctgtaatattgttcgtaatatctagaaaaggagaggataatattactttcaacatcgcagggggtgtacaccttccttgttatattgttgctaatatccagggaaaaagaagatgacattaccaccactattgcagaaggtgtacacccccccttgatatagttcctaatatccagaaaaggagaggagatattactccaaatattgcaagaggtgtacattcccctgtaatatttttcctaacattcaggaagaaagagagtgatattgcccttaatattgaagggagtgtgccccccccgtgatattgtttctaatatccaagaaatgaaaggatgatattactcccaatatcacaggggctgtacagccccctcccatgatattgttcccaacatcggggggggggtgaaatagtattattcccagtatcacaataggtgtacacacctgtcgtgatattgttcctaatacccatgggggaaaggacgatattattcttaatatctcagagggatgtacaccctccctgtgatattgttcctaatatccggggtgggagaggatgatattacccccaaaatctcaaagggtgtacacccctcttgtgatattgttcctaatatccagggtggagaggataatattattcccaatatccaggaaaggaaacgatgatgttactgtgaatattccagggggtgtcctcccctctgtgatattgttcctaatatccaggttggggagattatgatatttctccaaatatcacaaggggtgtacaccaaccctgtgttattgttcctaatatcgatggggggagaggacgatattactcccaatatcacagggggtgtacaccacctttatgatattgttcctaatatccatgaagaaagaggatgatattactttcaatatcgcaggggatgtacactccccctgtgatattgttagtaatacctaggagaagaaagtgtgatattactcccaatatcgcaggggatgtacacgcttcctgtgatattgttcctaatatttagggggaaaggggatgatattactcccaatatcgaatggtgtgtacacccccccgtgattctttttttttttttttttttttttttgagatggagtcttgctctgccgcccagactggcgtgcaatggcgcaatctcggctcactgcaacatttgcctcccaggttcgcacgattctcctgcctcagccttcggagtagctgggattataggcagctgtcaccataccaggctaatttttgtatttttagtagagttggggtttcaccatgttggtcaggctggtcttgaattcctgacctcaaataatccacccaccttggcctcccaaagtcctgggattacaggcataactttccctgtgatattcttcctaatattcaggaagaaagaggatgatattgctcccaatatcgcagagagtgtgcactcctcctgtgatatggttcttaatattcagaggaggagaggatgatattactttctatattgcagaaggtgtacacctccctcgtgatgtctttcctaatatccagtgggggagaggttattagtctcaaaatcacagaaggtgtaaacccccatttgatattgttcctaatattcaggggtggggagagaaaggtattactcctagtatttcagggcatgaacacccccaccgtgatatcattcctaatatccagaaggggaggcaatgatatttctcctaatatcacaaagggtgtacaccccttctgtgatattgtaaatattctgtgtgtacacccccctgtgttatagtctgtaatatccgggtgggggagagggtgatatttctccccatattgtaggggatgtacacccttctgtgatatggttcgttatatccagggaagaaaaaggtaatattgctgcccatattgtggagagtgtacacccccatgtaatatggttcgtaatatccaggagtggagagggtgatactgctccttacatcgaggaaggtgtacaccttattgttatatgattcgcaatatccaggggaggagagagtgatattgctccccatgtcgcagggggtgtaaaccctccgtgatatgattggtaatatccaggaaaggaaagggtgatatttctccccatatcgcgggggacgtacatcctcctgtgatatggttcgtaatatccaggaggaaagaggaaaatattgctcttcataacccgaggggtgtacaacccctgtgatatggttcgtaatacccagaagtgtacacccctctgtgatatggtttgtaatatccagggggttagagggtgatattgctccccatatcgcagtgggggtacacccccctggattggttcataatattcatggggggagaaatttacatttatcctcatatcagggggggtgtacaccccccgtgatatggttcgtaatatccaggggaagaaagggtgatattgctccttatatcgcggaaggatcaccctcccctgtgatatggttcataatacccagacgggaagagggtgatattgttcttcataaagcgaagggtgtacagccccctgtgatatggttcataatatgcaaaaggggagagggtgatattgctccccatatcacggagggtgtactcccttctttgatatggttcgtaatatccaggggtgtagatggtgatatagctcgccctattggggagggtgttcacccctctgtgatattgttcgtaatgtccagggaaagagaggatgatattactcccaatatcgcagaaggtttacaccactctgtgatattgttcataatatccagggaaggagaagacgatattactcccaatatggcagggggtgtagaactcctgtgatattgtttgtaatatccaggcaaggagaggatattactctcaatatcgcagaaggtttacacccctatgtgatactgttcatgatatccagggaaaaagaggatattactccctatatcacaaagggtgtacacccctttgtgatattttttgtaatatccaggggagagaggataatattactctcaatatcagaaggggtgaaaaccctcctgtgtcattgttcataatatttagggaaggagagagtgatattactccaaatatcacagtgggtgtacacccccctatgatattgttcctaatttccagaaggggagatatgatattattgccaatatcgcagaaggtgtacaccttactctgacattgtttgtaatatccagatggggaaatgatgatattactcctaatatcacagggggtgtacacccccttgttttattgtttgtaatattcaggggaagagacgattatattactcccaatatcgcagggtgtgtacaacactctatgatattgttcataatatccaggggaggagaggaagtgtacacccccccgtgatattgttcgtaatatccagaggtagagaggatgatattactcccaatattgcaggtggtgtacacctttctgtgatattgtcatgatattaagaaggggagaggatgatattactaacaatatcacaaaaactgtacactccctgtgatattgttcataatatccagaagaagggaggatgatattattctgaatctcgcagaagatatacaccaccctgtgatatggttcataatatcctaggggaaagaggatgacataactgtcaatatcgcagggggtgtacaattccctgtgatattgttcacaatattcagagggaaaaaggataatattactttcaatatcgcaggcggtgtacacattactgtgttattgtttataatatccggaatgagagaaaattttctcccaatatcacaggaggtgtacactcccctgtgatattgttcgtaatatccagggaggggagaggatactattactcccaacatctcagggagtgtaggccccccctttgatattgttcctaatattcggaagtggagaagatgatattacttccaaaatcgcagggggtgtacactccctctgtaatattgtttctaatattcatgagtggaaagaaagatattactcccagtattgcaggggacatacaccacactgtgatcttgttcacaatattcgggggggagaggatgatattactcccaatatcaaagtaggtgtacacccccttctgatattgatcgtaatatccagaattaaagatgataacgttactcccaatattgcagggggtgtacatttttgaatactgttcataatattaagagggggaggggatgatatctgtcccaatatcgcaaagtgtgtacacctcctgtgacattgtcccaaatatccagaggaaaaaaggatgttattactcttaatatctcagagagtgtacacctccctgtgatattgtttgtaacatccagaagaaagaggctgatattactcttaatatcgcagggggtgtacacccccgccccgggatattattcgtaatatccagggggaagtggaatgttcagaatgggagaggatgatattacttgcaatatcatagtgggtgtacaccccactgtgatattgtttgtaatatccgggaaaggagaaaatgacattcctccccatatggcaggggctgtacaccacctatcatattgttcaaaatatccagaaggggagaggatatgtctccaagtatcacagggggtgtacaccccgctgtaatattcttcctaatatccagggtgtgagaggataatagtactcccaatatcccagggcatgtacaccccccttgtgatgttgttcctaaaattcatggggagaaagaatattactcccaatatcacagggggtgtacatacactctgtaatattgttgccaatatgcagcaggagagaggatgatattactcccaatatcacaggggctgtacaccccgctgggatattgtttctaatatcaagggggaaaaaggatgatattactcccaatgtcgcagggtgtgtacttcctctttgtgacattgttcctaatatccaggagagaagagggtgacattccttccaaaactgaaaggggtgtacacaccctttgagatattgtctttaatatccagaacgaaacaggatgatataactcctaatactgcaggggggtacaccctctctgtgatactgtttctaatatccaggaggggaaagaaaaatattaatcccaatatcacagggggtgtacattccccctttaatattgttcctaatatccaggaagacacaggatgatactatttccagcagcacagggcatgtacacccctttgtgatattgttcctaatatccaggaaaagagaggatgatattactgtcaatattgcagggcgtatacactggttctgtgatattgtttctaatatccgggggtggagaaaatgatattactcccaatattccagcgggtgtacacccgttctatgatattgttcctaatatctgggggagagagaatgatattattgtcaatatcacaggggatgtacagattccctgtgatattgtttctaatattcacagggggagaagggtataatactcccgatatcgcagggggtgtacactccccctgtgaagttgttcctaatatccagggattgagagaatgatattactcccaatatcacaggcggtgtaaaccccctgtgtgatattgttcctaacatccagaggaaaagatgatgatattattttcaatatcacagggggtgtacgcatccctgtgatattgtttctaatatccaggggaggagaggatgatattattgttaatatcgcagggggtgtaccccaccctgtgatactgttcctaatatccggggtggaagaggataatattgctcccaatatcgcaaagggtgtacaaccttcctgagatattggtcctaatatccagggagggagaggatgatattactttcaatatcacagggagtttacacaacccctgcgatattgttcctaatatccagcggaagaagagttaggataatactattttcaaaattgctgggtctgtaccccctccccgtgatattgtttctaatatccaggaggggagaaagtaatatgactcccaatatcttagaagatgtacaccctccccataatattatttcttacatccagggggtagaggatgattttgctttcaatatcacagagggagtaaacctttccggtgatattgtttttaatatttaaaaagagagaagataaaattactcccaatacaaaggggatgtattgtgtactcccccctctgatattcttttttaatatccagatggagagaggatgatattactttcaatattgcatgggatgtataaatcccctgtgttattgttctgaatatacaggtggggagagtatgatattactccaaatatcgcagggggttctttccccctgtgatattgttcctaacattcagggagggagaggatgatattactcttaatattgcagggggtgtacccacgcctatgatattgttcctaatatccagagggggagaggatgatctaactcagaatatgacaaggggtgtacacacagcctgtgatatggttcctaatatacaggggagaaggggataatatttctcccaatatcgcagggggtgtacaaccccctgtgatactgttcctaatatacagaaggggacagcatgatattgttcctaatatcgcaggaggtgtacaacgccctgtgatattgttcctaatatccagggcgggagaggatgatattaccctcaatatcgcagggggtgtgcactttccctgttatattgttcctatgatccgggtggggggaaatgacattagtcccaatatcgcaggatgtgtgcaccgctcccccgtgatattgttcctaatatcaagggggagagaggaggatattactcccaatatcgcaagggatgtacatcctccatgcgatattgttcgtaatattcaggaggagagaggatgatattactcttaatatcgcagaaagtggacacccaccctgtgatgttcttcataatatccagggaagcagacgattatatgactttcaatatcgctgggagtgtacatcccttttgggatattgtttctaatatccaggaagggagaggattatattactctcagtattgcaggcagtgtacaccttttttgtgatattgttcctaatattcagaaagggaaaggatgatattactcccaatattgcaggtggtgtatatccccctctgatattgttccttatatcaaggaagagaaagaataatattactcccaatatcaaagacagtgtagacccctcctgtgatattgtatttaatatccatggggaaagaggatgatgttactcccaatatcgcagggggtttacacccacactgtgatattattcctaaaatccagtggaggagaaaataatattgctcccaatattgcagggtgtatacaggccctcccccgttatattgctcctaatatccagcggtggagaggatattactttcaatttgtgtagggagtgtatacccccctgtgatatttttctaatatcaaggatgggaaaggatgacattactcccaatatcgcaggaggtgtacacgccctgtgatattgttcctaatatctagggaaggagaggatgatattactttcaatattgcaggagctgtacaccctctgtggtattgttcttaatatttaggttgggagaaaatgatatgagtccaaatatcgcagaaggcatacacacttccaataacattgttcttaatatccgggggagagggtgatattactcccaaaatctctggggggtgtacacccccttctgatatttttcctaatatccagggaaggaaacgatgatattactataaatattccaaggagtgtacaccttcctaatatcctaatattgttcctaatatccaggggtgggagaggattatattactcccgatatcgcagtgggtgtacacccctcctgtgatattgtttctaatatccaagctaggagaaaatgatatcactctcaataccacagggggtgtacaccttccgcatcatattgttcctaatattcagagggaaagaagatgaagttactttcaatatcggaggggttgtacacaacccctgtgatattgctgctagtatccaggaagaaaggggattatgttactccccttatagcagggggtatacacctcccctgtaatattgttcctaatatcaaggctgggatatacgtggggggaaggatgatattactcccaatatcgcaggggttatacaaccttctgtgatattgctcctagtaaccagggcagaagaagatgatattactcctaatatcgcaggaggtgtacactcccccattatgttgttcccaatatgcagaaaaggagaggatgacattattgccagtatcgcagggtgtgtacaccacccctgtaatattgttccaaatatttagggggagagaggatgatattactcccaacatcgcagggggtgtacacacatcccctgtaatatagttcttaaaatctaggggaaaaggggatcttatttctctaaatattgcagagggtgtacactccccggtgatattgttcctaatagccgggagggagataattaaattactttcaatatctcagagagtgtacatcgcccttgcgatattgttcctaatatccagagcaaaagagaatgatattactcccaatatcttaggagtgtacatttaacctgtaatattgttcctaatatccagggggaagagaatagtattactgccaatatcgtaggggttgtacaccttttctgtgatattgttgcaaatatttagtagagggaaagaatattactcgcaatatcacagggaatgtatacttcccctgtgatattgttctgatatccagaaaaagagagggtaatattactcccaatattgcagggggtgtacaccccccttgtgatattgatcctaatataaaggaaggaagaggatattactcctcatatagaaggggttgtccaccccccttgtgatattattcctaatattcagggaagcagaggatgatattattttcaatatcacagagggtgtgcagtccacctgtgatattgttcttaatattcggggggagaggatgttattatgcctgatatcgcagtagaggtacacccctcaagtgatactgttcctaataaccaggggtgaagaggatgatattactcccaatatcgcaggtggtgtacacccccccatgatggtttctaatatacagagggggagaggaaaatattactcccaaaatcgctggaggtctacaccccccttgtgatattgttcctaatatccaggaaaggaaacgatgatattactgtgaatattccagggggtgtacacccgctttgtaatattgttcctcatatccagggtgtggagaggattatattactcccagtatcgcagggggtgcacgacgcccctgtgatattgtttttcatatccaggaggggagattattatcaatatggcaaggggtgaacaccccctgtgatattgtacttaatagttaggttggcagaaaatgatattagtctcgatatcgcagggggtgtgcactccgcctggtgatattgcttttaatatcaagggggagaaaatggcattactcccaatatcgcagggggtgtacaccgctcatgtgatattgttcctaatatccaggtggagagaacataatattactcccaatatcgcacaaggtgtacacccctcctgtgatatggttcctaatatccatgggaggagatgatgatattactcccaatatcacaggggatgtacaccacccttgtgatattgttcctaatatccagggaagaaaacgatgatattattgtgaatattacagggagtgtacacactccctgtgatattgtttttgatatacagggtgggagaggatgatattactcccaatatcacataaggtgtacaccccccgtgatattgttctaaatatttcggtggggagaaaatgatattagtctccatatcacagggggtgtgtgctcctcaggtgatattgtttttaatatcaagagggggaggagattatattactttcattatcacagggggtgtacacccctcctgtgatattgttccttatatccaggcgaggggaaaataatattactctcaatatcgcaggaggtgtacacaccccatgtgatattgttcctaatattaagggggaaagaagataatattactttcaatatcacagggtttgtactcctttcttgtgatatagtttttagtatccagggggaaagagcatgatattactcccattgtagcaaggggtgtacacacctcctgtgatattgttcctaatatccagaagtggtgaggatgatattactcccaatatcgcagggggtatacaccccacctatgatattatttctaatatccatgggaaaagagtatgatattacacccaatgtcgcagagggtgtgtatttttcctgtgatattgtttctaatattcaggcggggagaagatgatattactctcaatatagcagaaattgtacatccccgctgtgatattcttcataataatcagggaaaaagaggatgatattactaccaatattgcaggggggttacacttcccctatggtagtgttcctaatatccaggaagaaagaggatgatattaatcccattatccaggaagtgtacacccaccctgtcatgttgttcctaatatccagcagggaagaggatgatattacaccccccccccgtgatattctccttaatatccaggaggggagaggctgatattactggatatatagcaggggtgttcataccttctgtgatattgttcctaatatccagaaaaggagaggatgatattacttccaatatcgcagaaggtgtacacctccctgtgatattgatcctgacattcagaaggggagaggatgatattactcaaaataccgcagggcatgtgcattcccttgtgatattgttcctaatacccagaagggaacaggataatattactttcaatatcgcagggagtgcacacccccctttggtatggttcttaatatccagaaggaaagagggtgctattactttccatattgcaaggggtgtacaccccactgtggtatggttcataatatccaggcagggagagggtgctattactccccacagtgcggggcatgtacaccctgctgcggtacggttcctaatatccagggggagagaggatgctatgactccctatatcgcggggtgtgtacacccctgtgtggtatgttttgtattctccaggaacggagagggtgttgttacccctcatatcgctggaaatgtacactcccctgtggtatggttcgtaatatccaggggattgagggtactgttacccccatactccccatatcgtggggggagtgcacctccctgtggtatggttcgaaatatccagggtaagagagggtgctattattccccattttgcaggaggcgtacacccccctatggtatggttcgtaatatccggggtgaggggatgctatcaaaagaagagagaaagagaccccccatattgttctatattattttatactcagtacctgttttaagaagaaacaaggaagtgaaaccaaaagcaggcagcccggcgccaggcaccagacccaaaaccagacccgaaaccaggcctgggcctgcctgaccttagcctgatagttaaaattcaacccatgacctagcaaccaatgttatccatagattccagacattgtatggaaggacattgtgaaatttcttgttctgtgctgtttcactctgattaccggtgcctgcagcccctgtcacatacccactagattgctcaatcaatcatggccctttcatgtaagatctttagtgttgtgagcccttaaaaaggacagaaattgtgcactcaacaagctcggattttgagacgctagtctttcgatgcttccagctgattaaaagccacttccttcactacctcggtgtctgtggggttttgtccgcgactcctcctgctacactatgactccccatatcaaggggggtgtacacccccctgtggttcgtaatatccagcaggggaaaaggtgctattactccccatattgcagggagtgtacacccccttgtagtatggatcgtaaaatcaaggggggagggaaggtgtaattatccccatatctcagggggtgtacacccctttgtggtaaagtttgtaatatccagggatattacagggatattatccccaaattaatacttttataatttcttatgcctgcctttactgcaatctctgaacataaattgtgaagatttcatggacatttatcacttccccaatcaatacttttataatttcctatgcctgtctttactttaatctcttaatctcatcatctttgtgagctgaggatgtatgtcgcctcaggaccctgtgatgattgcattaactccacaaattgtttataaaacatgtgtatttgaacaatatgaaatctgggcaccctgaaaaagaacaggataagagcgatgttcagcgaacaagggagataagcataaggtctgactgcctgtggggctgggcagaacagagtcacatttttcttattgcagaaaatgagtaggagaaatatcactgggaagggaacgcattcctaggggaggcctatggacggccgctctgggggtgtatcccttatgtggttgaagataagggatgaaatacaccctggtcccctgcagtgccctcaggcttgctaggattagaaattccagcctggcgaattctagtcagaccagttctctgctcttgaaccccgtttcctgttaagatgtttatcaatgacaatgcgtgcacagcaggacatggaacctcaatagtaattccattttctccctggccttgtgaccttgctaggcccttctgcccttgtgatcttttattgccatttgaagcatgtgatctctgtgacccactccctattcgtatccccctccccttttgaagtccctaataaaaacttgctggttttgcagatcaggtggtcatcacagaacctgccgatatgtgatgtcaccccggaggctcagctgtaaaatttctctttcgtactctttcactttatttctcagaccaggtgacacttaaggaaaatagaaaagaacctactttgaaatattgggggctagttcccccaatagacattgttcctaatatccagaaaaaaagaagatgatattactcccaatatcacaggggttgtgaaccccacctgtgatatggttcctaatatccaggaagggagagaatgatattactctccatattgcagggggtgtgcacatccctgtgatattgttcctaatatccaggggaggagagggtgatattactcccaatattgcaagggttgtaaactccaccctgtaatattgctcctaatatttaggatttagggggggagaggataatattactcccaatatcgcaggggatgtatatgccctctttgatattgttcctaatatccagggggggagaggataatattactttccatatcacaaagagtgttcacccccctgtgatattgttcctaatatccaaaaaggaagaggatgatatcaatcccaatatcacaggaagtgtacaccccccccttttatattgtttctaatatccaggggaaatgagggtgatatttctctcaatatagcagaatgggtacactccccctgggatattattcctaatatccaggggaaaaaaagaggttgatattcttcccagtatagcagggaatgaatacaccctttgtgatattgcttctaatatcaaggggaaaagaggatgatatgactcccaatatcacaggggatgtaaacctgtggcgttgttgctaatatcaaggagggaagagtatgatattactcctaatgtcgccgaaggtgcacactttccctgtgatattgttcctaatatccaaaagggaagagaatgatattacccccagtattgcagggtgtacaccacccctgtgatattgctcctaatacccaggaaaaaagagaatgctattacccccaatatctaaggggacgtataccttccctgtgatattgtttctaatatccaagtggggagaggatggttttactctcaatattgcagggagtgtacactccccctgtgatactgtttctaatactcgggctgggagaaatagtattactcccaatatcgcagtgatattgtttccctgtgatattgtttctaatatctagtgggggagataattatattactaccccatacacaggggagggtgtacattcccctgtgatattgtttgtaatatccagggaaggagaggatgttactcccaatatcacaggggttgtacaccccttttttgatattgttcctaatatctggggggcagagaattatattactgtcaatatcacagagtgtgtacaccccctctgttatattactctttatattcagggcggtagaggatgatattactccctatatcacagggggtgttcacccctcctgtgatattgtttataatatctaaggggaaagaggatgatatcactctcaatatcaaaggaaatgtacacctttcctgtgatattgtttttattatataggggggcagaggatgatattaagaacaataccacaggggatgtacacccacgtattgatattgtccctaatatgtatggggaaagaggacagtgtaactcccgatatcgcagagtgtgtacacccccttgtgatattgtttctgatatacacggggagaaaagataatatttcttccaaaattgcagggggtgtacaaccccctgtgatattgtttttaatatccagtgggggagagaatattactcccaatattgcagggcgtgtacacaacccctgtgatattgttcctaatatccagagtaggggaggatgacattactttcaatatcgcaaggggtgtacattcccctgtgatattgctcctaatatccatgaggggagaggatgatattattcctaatatggcaggggctgtacaccttccctgtgatattgtttctaacatccagtgggggagaaaatgatattactccctatatcacagaaggtgtacactttccctgtgatattgttcctaatatccagaaggggagaggataatattactcccaatatcgcaggaagcttacaactcccctgtgatattgtttctaatatccagggaggtagggatgatattactcccaatatcgcaggggatgtacactcccccgtgacattgtttctaataaccagggggtgagaggatgatattacgcttaataccgaagggggtgtacacacccttgtgatattgtgcctaatagccagggggaagaaaattatattaattttaatatttatggggaaaaaggatgatattactcccaatatcacaggggctgtacaccgaccttttgatattgtttttaatatccagaagagaagaggataatattgctcccaatatcagaaaaggtgtaaaccccttctgtgatattggtcctaatatccagggagggagagaataatattactaccaatatcacagaaggtgcccacccccaaggtgatattgctcctaatatccaaagataatagggtgatgttactcccaatatcacaggaggtgttcacaccccttgtgatattgtttctaacgtacagggaagggagaggatgatattattcccaatatcacaggaggtgtatactcctctgtgatattgattttaatattcggggggaaaggatgatattactccctatatcgcagagggtgtacaccctctgtaatattgatcctaatatccagggcgggataggatgatattactcccaatatcgcagaaagtctacacaacccccagtaatattgtttttactatccagggggaagaggatgacattactcccaatttcacagagtgtgtacactcaccatttgatattgtttctaatatctagggggagagaatatattactcccaatatcacaggaattgtacaccacctctgtgacattcttgtgaatatccggggaaaaagagaataatattactcccaatattgcagagcgtgtacacccctccatgatatcgatactaatatttttttaaagaggatgatattactcccattgtcacaggatgtgtacaccccccttgtgaaattgttcataatattctggggggagagcataatattactccccatatcgaaaaaggtgtccaccctccttataatatggttcctaatatccaggatattacttaatccaggatacttgtaataccctaaatatacaattgcttgaacctccacctcccaggttcaagcaattcttctgcctcagcctcccgagtagctgggactacaggggcacaccaccacacccagctaatttttttttcttgtatttttagtagagatggggttttgccatattggccaggctggtctcaaactcctgaccttgtgatctgcccacctcagcctcccaaagtgctgggattataggcgtgacccaccgtgccaagccaggaagaggatgctctatagatttccccaataagagatggctttgcagggccattccaaaatatgtcaaagaaatacatttggggataaaatactttgatttcctttagggaatgttatctattatgtgatgctataccagagtcaggttggagtcggttatcttattgcaacaaagagtctgttccgtcactgttgggatctctattttttcctcttatttcttgagacagggtctcactctgtcacccagtctggagtgcagtggtgcgatcttcattcactgaaacctctgcctcctgtgttcaggtgattctcgtgcctcagccccttaagtaactaggattacaggtgtgcgccaccacacccagctaatttttgtattttcagtagagatggtattttgccctgttggccaggctggtcttgaactcctggcctcgtgtcatctgcccacctcgacctcccaaagtgctgggactgcaaatgtgagctattgtgcccagccaggatctctgttttaatgttagtgctggtcactttgcatgaactccaaagggaagaaatataatgaggtgtgtctgaccccctgccttctcatcgtgacctgaattagtttttcaggtttgcaggggatacccttggacaagaaggggctctattcggttggttggggggattagaattttactttttgtttacaatatttctcctgaaagagttaggggctcacaaggaatttccgcgtgagcaacttatgaggaaagccatctgggaagatatgtgtccttgtgtcactgggatattctcgtttaccccaatgatacggcaatgacgcagggttgtgaaattacagctatgtgtttggggaaaaaagaaagcaggattgtgtgactacgtttccaaacttcacttgcccttagccatagtgagttgggggcctggagattctgttttctttcacaatgatatagatacaattaaatgtatagaaagcaaaaaaataaaaaggtgagtaatgaggaacctctgattcctgagtggccatgtagttacccatggcacagagccacagttactgaaggtaaagtttgctggggaatttagaaatgaatccagctcttggaggagtcagtttactggatgcctaagaaaatgcaaacaaaataagaaaaaagggtaatattcaatcccatagttattgttacctgtcatagctaaagtaaaattaaaacagagtgctggcttcaatcttgatgctacactaagcttagatttcagtgaatgtgagtctcagccactagctcagagccacctcccaaagaccaaatcatgtagggacaatagaaagtacttctgagaattgtggttaccaagaacctagtaactgttggggaggagcaaaacaaagtacagaaaccagagggtacaatctgagtgagactgctatcagcttctggaggagcctttactaaaatgaatgatgagagtaactggatgatgagagtaactaatggatgatgagagtaagcaatgtctttggttttcttttttttttttttttttttttagcagacgtctcactcttgtcgcccaggctggagtgtaatggcatgatctcgcctcactgcaacctccacctcctgggttcaagcaattctcctgtctcagcctcccgagtagctgggactacaggcactcatcaccacacctggctaatttttgtatttttagtattttctggtgagggtccaggtttccggaaacaactcagagacatatgttaagatgttatctttagttttcacagggaaccaaatatgttacgactccaatttccttggctattgttttaagttaccattaccttctcgttgatcaagttgctcatttacttctcaagcctagctagatgcctggaatttcccttgaaggaagtcaagattttcctttatctccatactggctgatggtgatcgagtaagcccctaagaggggtccctgctccatctcgagatgctgctagattctacagtgcctaataaacagctctcgcctggccgacaaagagctgcttgctctctggatagcaattccaaagtgaacagacaacatcctgtttggaagactgccactctgttagaagaagcatcaggaaaacctttcttttgagctatttataactaacagcaattgaccaagtatacttttgtgagtgaaactgacctttctccctgtaagaattctccaaaatttggaaactatttgtgagtatttttacttatggcaatataattattggcacaagctcaatcagattcggttttctttcgtaacaggaaccattggagatactcattactctttgaaggcttacagtggaatgaattcaaatacgacttatttgaggaattgaagttgactttatggagctgataagaatcttcttggagaaaaaaagactgggtatattttcaatatgctttccttttaaggtccctcacctgtggaaagtaaagaatgtcactttctgacaggctcaggaacctcaagttatgtagggatctcaagaagatgggggaattcacccagttcatacaggtgaaattgctgttgcaaagattatgaatatgagagaagtccagcatggctgacttcatctcgtgtctggcctcaggctggctgcccttgctcactcttgggcataggccaagctagccatgggaggaatttagtttatagtttaactttgaagcacggatgataatagtctctccctaaaatgaaccccttccttgctcagggactgaaactacctttgtatgacaaatgaaagcccacaagattaagattatgagaggggcctgaattctgctaaaatgcaggtgtagctgactgataacaagtcattgtcccacagcttgcctttctataatctcttgcttctcaggagtcacatggccagaggtcctgagatttccagtcctgtgacccccacccagagatggacttagtgcatgaggaccattttccacacccctatgatttcatcctcaaacaatcagcagcaaccattccctagccccctgccttccaaattatccataaaaatcctagcctctgagttattagggagattgattaataatcccagtcctaccccttgggttgctctgatttaattaaaccttctctactgcaataccacggactcagtaaattggttttgtctgtgcaatgggcaagaagaacatgttgcatggttatacaggtactacaagcacagtctgatggcaaattattggttttgcttcctgcccttgatgtttctaaacatctagtccaaaattacttgtgaaaggtccagcaaagccaattttaaaagaggctatatggccaatcactattctttctacacattattgcaaataatcaggccacggctgggcacggtggctcatgcctgcaatcccagcactttgggaggctgaggcaggatcacctgaaatcaggagttcaagaccagcctaggcaacatgataaaaccctgtctctactaaaaatacaaaattagccaggcatggtggcatgcacctgtaatcccagctacttgggagactgagggaggagaatcacttgaacctgggaggcagagattgcagtgagctgagatcacaccactgcactccagcctgggcaatagagtgagactttgtctcaaataataataataataatcagaccaagtataatgaaattaaaatttattttgcaaataaattggtcctactacaatttatccttcatagaaatgtggaaactgaagataaaaaaaattaggtttcagaagaaaactatactacacctgttattagattctagccctaaacattgtttttgaggtttttattatttacctgcaatttggtctaaattctgaattatttcctgactacaagtatccaaggaataaatgggttttctttttctttatgatagttttagttggcttctaatgcaacaacaatttttattgtaatcctgtgtgcattctattcctactattcaaattattaatgttatagatctttcattgtagtacttctgaattaaccaaaatcacagtattctgaagatgattctacaaagcctgctgtttctacaaaggctgctgatgatttctacaaagcctgctgtagtgttgctgtggcctctgcttaaaaaagtagaaaacacattgatgcagcatgttcaccccaacctccctgcctaaaggctcagggaccatcttggaagaggaaggcgcgtgagattgtaagagccgaattagggggatggagtgtggagaataaggacacttcatcttggatgctcacctgccaaattgacttctgatgaaagccagctccagaaatgtgcctacagttactactttcacctaaaccctgcccttagtcaaatccttctcttcttctaagcaatcaacttcaattccttgtataacccacagtataaaagggcttttataccattctatcctattgcatgtaagccttgggtctgggaggtaacagtgtgggattccaccatctcatctccctgccacccaaacatgcctgctcttctttaagcaatattaaatgtttgtacttcagaaatttgatttgtcagcctcttcttcagactctcagcttctttggcctttgggagtaaatttgcataggcctgctcaaaacaggatgttctgggggtttgggggtgttgttttgttttgttttttgttttgtttagagacagggtctcactctgtcacccaggttggagtgcagtggtgcaatcatggcacactgcagcctcaaactcctaggctcaagcaatccccccaccttggcctcccaaagttctgggattacaagcataagccaccatgcccagccctggacttttctttaaagacatttacacagtgtaggaattactgtgggtgcactgctcaggtccccttctccaggatgctcattcctacctcatagatgattttcctgcagagatttgacctcagctgaagggcagtcacctggtccaggtggttgctattcacctccttcctgagaacagccaacagccagggacacgctagcacagagatataagagcgaccaaggtgaggccccttctgtgctgcggtgcatgctccagagcctccctgggatcagacttaagagggtctccagccagatctggtcttcgctgctttcctcgagctccccagcgcactcctgcaatgcatcttttttttttttttttttttttttgagacggagtttcactcttgttgcccaggctggaatgcaatggcgcaatctcagctcaccacaacctctgcctcgcgggttcaagtgattctccttcctcagcctcccaagtacctgggattacaggcatgcaccaccacgcccagctaattttgtatttttagtagaaacgggtttctccatgttggtcaggctggtttcgaactcctgacctcagttgatcctcctgcctcagccttccaaagtgctgggattacaggtgtgagccactgtgcctggcccaatgcacctcttgaatcacctcctcatgctttgcttttagagaacatgatccccaacatgtgattccagcaaagattctagaaagccaaccgtgacaatcacttctgggtttagatgacccccccccaccacaagatggcagtgagcacctcatcacagaggtgctgatggtctgcagcaccgcgccaggccagaacgtgccttttacagaagaaaataacccagtagctgactaggatggtgaggagggctggtgagcactgcggtagtgagagggacactagcatcactgagatgcaagtgatggtcatttttcataggtcaaagctcaaagcaggggacagttacagggcagggcttcatagcaccagtgtgatgaaagtatctgggagtggctaaggccagcactatgccatgggaagcaaggtgggcctgaggaggaggcagcagcgtcagcctgcaacaagtgggggctgccctgcagagacctaagagtcatgttatagagcacagtgtctgtaaggccaagaagtgtggacagccaagtgtgtcaattactagacatactcaagaggagcaggaagggcagggcatggtggctcatgcctgtaatcccagctacttgggagactgaggaaggagaatcgcttgaacccgggaggtgaaaattgcaatgagccgagatttcgccactgcactccagcctgtgtgatgggagcgggactccatctcaaaacaaaaaaagaaaaaggaaaaagaaaaaaagaaaaacctaggtatacttctcaagcaaataaaaataatcaaaaccaatatcatgcccgggcacaaatttcatatatataacagatttaaatatatgagggtgattatcctctcatatctccatttttttttgtttttccatttttttctttactaaaaaaagttaatgccaatgacacacaatttttttttttttttttttttttgagatggagtctcacttcttcgccctggctggagtgcaatggcgtgatctcgactcactgcaaagtctgcctcctgggttcaagcaattctcctgcctcagcctcccaagtagctgggaccacaggagtgagccaccacacccagctaatttttgtatttttaatagagacggggtttcaccatattggccaggctggtctcaaactcctgatctcaaataatctgcccgcctcggcctcccaagattctgggattataggcgttgagccactgcgccccgcctatgtatgattttttttttaattttattttcataagtttttggggaacaggtggtattttgttacatgagtaatttctttagttgtgatttgtgagattttggttcacccatcaactgagaagtatacactgaacccaatttgtggtcttttatccctcacccccttcccaccctttcccccggagtccctgaagtccattgtatcattcttatgcctttgcatcttcatagcttagctcttgaacccttactttctgtttgagggagaagacatatcatctacaagtagatactgtgtaaacattccattgcatgactatcccataacttatttattatttgtgtttggttatttgctgctatgtaacaaccccactcccaactaaatggtgtgacaattccatgattctgtggatcaaaaattctgaaaagtcaaacccaaggagttttgtctctgctccatgatgctaaagcctccgcaggggtgaggcgaatggctcagggtgactgaaaagctcagggttggaacagctggggatgaggcctctatgtataagatgattcttcactcacaggtctgaaactatggtggggacagccagaaggctcggctcagctgggacagtcacctgagccctacacatgacctctccaacatggtgatcctgaagcagttgggtttcttacacagcatcacacttttcttttttttttttttttttgagatgaaatattgctctatcacccaggctggagtgcagtggcacgatctcagctcactgcagcctccgcctaccaggttcaagcgattctcctgctccagcctcccaagttgctgggattgcaggcgcctgccaccaagcccagctaatttttgtatttttagtagagacggggtttcaccttgttggccaggctagtcttgacctcttgacctcaggcgatccgcctgcctcggcctcccaaagtgctgggattacaggcatgagccaccgcgcccggccaaagctcacacttcttatgattcagccttagatgtcacatcagttcattttccccacacttattagtgttagaagtcacaagcccacccatactcaggggactggcacacagaccccactctcaatggaaggggtgggacaccaccattcctgctgatgggcatttgggtaacttcctgtttgaagctattaagattgggctgctgtggccgggcgcagtggctcacgcctctaatcccagcactttgggaggccgaggcgggcggatcacgaagtcaggagatcgagaccatcctggctaacacggtgaaaccccgtctttactaaaaataccaaaaaaaaaaaaaattagctgggcatggtagcgggcgcctgtagtcccagctactcgggaggctgaggcaggagaacggcgtgaacccgggaggcggagcttgcagtgagccgagattgtgccactgcactccagcctaggcgacagagcaagactccgtctccaaaaaaaaaaaaaaagattgggctgctgtgactattctagtaggtgtctttggtgagcgcctacacgtgtttctctttttctctttagtatatgcccaggaggggaactgctggctcccagataccgtatgttcagggtcacacacacttccacagggttttccaaagcccttgtaccagcacgcactcccagcacctgtgtgactgctccagctgtcccacagtctcatcagttctattgctgatattttcattttagcttaagttatatttaataggaaaattaccgttgcctctgccccccgttcctgcctgtaggagtttctcgtagctgttgctacaggtggccacaaatctgtcacttaaacccacacaaattgatgtccttatggctttggagtcagaagtgtcaactgaaggtactagcagggctgtactgacctggtggcctcagggagcatctgtgctgcttctccaccttctagaggctgctgcatccctcgctccagccccttcctgacaccactcaccctcctacttctgttatcacatcctcaccttctctgtgttcagggctccctctgtctctctcttgcaagcacacttgggattccattgagggccacccacataacccaggagaatttctccacctcaatatccttaacaactgcagagcccttttgccataaaagttaccattcacgggttccagggattgtgacatgggtagctttaggagtgattattcctgcctgtctcccgctcaccagaacttggactttctctctcaacaggagccccctgtgtgggaatagcctgtctcaacgacgccctctataaggacctgcttcctcaaaggacctcatagtcgggtcctgcccctcagtgtccagtctgccttggctggaggggctgcaggggtgtgttggcgccacctggtggagacagggcatcacagcaggtgggagcccagtagaagcacaaccaaaacatgggtaatgtttaaaattttctggctaagcgctgtggctcacgcctgtaattccagcactttgggaggccgaggtgggtggatcacatgaggacgggagtttgagaccagcctggccaacatggtgaaacatcccctctactaaaaaatacagaaaaattagctggacatgtggcgcgctcctgtaatcccagctactcgagaggctgagacacgagaatcgcttcaaccccggaggggttgccgagatcgcgccactgcactccaggctgggcgatagagcgagactctgtctcaaaaaaaaaaaaagaagaggggaggcgaggggaggggaggggaaaagggggaatttgtttggagctgagacatccatcttctcctgacctcagatatttgcactcctggttatgaagccttcacacttggactgaatacaccaccagctttcccgatttccagcgtgcaaatggcagatcgtgagacttctcagcttccataattacatgagccaatttatatatataaattgggtcctccagaaaaacagaataaattatatatataattatacgcataacttaattaaattatacgtataacttagctatatatataatttattctgtttttctgaagaaccctactgacacaaatgttgagcatcttttcatgtgcttattggcttaataacttgtacatcttctttggggaaatgtctattcaagttctttgcccattttgtaactgaactattaatatttgtctttacattgttgagttgtaaaagttccttatatattctagatactagagccttatcagatatatttctgcaactattttctcctaatatataggttgtgtttttattttctttttctttttttttttattgagacagtctcactctgtcacccaggctggagtgcagtggcatgatcttggctcactgcagactcgacctgccaggctcaagcaattctcccacttcagcctcctgagtagctgaggttataggcacttgccatcgcacccagctaatttttgtattttttagtagagccgaggtttcgccatgttgcctaggttggtcttgaactccctgcctcaaagcgatctgtcagcctcagtctccctaagtgctggaagtacaggtgtgagccacagtgcccggccatctattttcaatagtgttttttgatgtacacaggtttggaattttgataatgttcaattcatccatttttttttttttttttttggttctttctactggaccaccactcttgagccctctaatccaacctccacgcggcagccagagggagctctctaaatgtaattactctttccctgctccacctgctcaaaacagtgtcacatttgtgatttaaaacagtatttctcaaacctaatttgcaaacaaagcaggtggaactcttcttgtatgcacagcatctgatttggttggtctggcatgggtctgggagtgagcacacctaccaagcggctgctggggtaacttgcgttttccactgatgatttcagcaatgtttccggtcccacatgctcctccagaaccttgtactcccccatgaaaaggtggagtccatttccccttcctttatttatttttttgagacgaagtttcactcttgttgcccaggctggagcgcaatggcgtgatctcagctcaccgcaacctccgcctcctgggttcaagcaatgcttctacctcagcctcccgagtagctgggattacaggtatgtgccaccacgcccagctaattttgtatttttagtagagacggggtttctccatgtcggccaggctggtctcaaactcccgacctcaggtgatccgcccgcctcagcctcccaaagtgctgggattacaggcgggagccaccgcgcccggctatttccccttcctttgaacctgatcaggacttgacgatggcatcaacatggtgagagtgaccctgcatggcttatgaggctgggttacacaaggcgatgttgcttctgactggctccctctcaggatacatgcccttggaacccatcctctaagctccttgggagcccaacttagcccatgtggagacaagacagggagagaaacagaggcacccccagccctcagccagcatcaaccgccagacaggagagcaaatgcgccaacaatgattccagctgaagcctcagacagcgtggagcagagatgagggatccctgcagattgcagatgcgtgagcaaaatgcatgctgtcactgttttgaaacaacaatgtctgggggctgtttgttatgcagcaatagacagctgtaacaatgctgttactgctgtattccatgaatgactgcactttgagtagcagggggctagatcactagataagccccatggcttctgtgtatgctatttttctacttttatatccttttcattcactttttttttttttttttttgagacagagtctcactctgttgcccaggtgggagtgcagtggtgcaatcttggcggactgcaacctccacttcccgggttcaagcaattattgtgcctcagcctcctgagtagctgcgactatagatgcacccccatgcctggctagtttccgtatttttagtagagacggggttttgccatgttggccaggctgatctcagactcctgacctcaggtgatccacccaccttggcctcccaaagtgctgggattacaggcgtgaaccactgcacccagcctcattcactttctttacttggctcatttttccttgttgcctcaattctcctctaagatcactttcctgacatttcagcctgggcctgttgccttctctgggtcccctccgcctcctgtgcctcccccatctcagccttgatccctcagattatacttcctctgtccccaccctgaccatcttggctgtccctggatagggatgggtatcttctcccactggtctgggagatctggaaggacaggcctggaaaagacttggtcactgctggaaggagctcagttagtgtggtgctgaggacagtacgggtgaggctggccccttcacccaaactcccactctcttccatagatttcacctctgtggcccaggccataggattagggcaactccccttaaacatcgagtccatcctccaagctgtccttttttttttttttttttttttttttgagacagagtctcgctctgttgcccaggctggagtgcagtggcgcgatctcggctcactgcaagctccacctccagggttcactccattctcctgcctcagcctcccgagtagctgggactacaggagcctgccaccacacccggctaattttttgtatttttagttgagacggggtttcaccgtgttagtcaggatggtctcgatctcctgacctcgtgatccgcccgcctcggcctcccaaagtgctgggattacaggcgtgagccatcgcgcccggcctcatgctgttcttgaatagtgagcacctgttacaagtcgccccaccagcctctcacttgtacccccctcatctctttctccccaagagacagaggaccctggcacttgtgaagcatgacccagaccctggggccatggcatccaacatcctcattccccatgacccctactgtctagatgtagctgccaagagacccccagactccccgggcctctgtctagagtgccaagacagagagagaatgccctgccgcttgcatgctttgtggggtgtccttcccccttccctggctgctaggcgtgacttcaacgttctccccaacccccaaacagcagcactgacaccagctgcagacctggctcaggttagctaatgaggaccaggctggggatggagcctgaacccctaaaccccagtcctgtaccccaccctaatcctggggtctccactggacaaaacgaagcagcttggtttttcgttgttattgtttttgagatagagtatctctctgtctcccaggttggagtgcagtggcgtgatctcagctcactgcagcctccgcctcccgggttcaagtgattcttgtgccgcagcctccccagtagctgggattacaggcgcgtgccaccacacccagctaatttttgtatttttagtagagacagggtttcaccatgttggccaggctggtctgaaactcctgacctcaagtgatttcccagcctcggcctcccaaagtggaagcggcttatttttaaggagaaaactcccgtggaaaggaatcagcacctcctctgtcaacatttcacttctctgaaaagactctcacttccaacagaaagtgctttgtaacacaacaatgaggctgggcgaggtggctcatgcctgtaatcccagcactttgggaagctgaggcgagtggatcacgaggtcagaagttcgagaccagcctgaccaatatggtgaaaccccgtctctactaaaaatacaaaaattagttccgtgtggtggcgtgagcctgtaatcccagctactcaggaggctgaggcaggagaatggcttgaacccaggagatggaggttgcaatgagccgagatcacgccactgcactccagcctgggcaacagagtgagactccgtctcaaaaaaaaaaaaaaaagaatgagaacatatggacacagggaggggaacaatacacacaaacaaaatttagaaacaggtgaaaataattttagtaatatttttactaatactgatatgctcaaaatattattatttcaataagtaatctaaaaattattgagatgtcttatgttcttttcatcatactaagcctttaatatttggtgtgtattttacactcacagcacatctcaatttgcagtccccatgtttcaagcactaaataaccatgtgtgtccggtggctaccatactggacagcgttgatctgaaatcgcatctgtatgcatcaccagcatatttgcagagatccccatctcagcagcacacctgaggctcatctgcgaaagcacctgcaacttctctacaacctcccacatcacctccaaacacatcctcatgtcatctgcaaacacacccatagctcacaggccaatgcctaaatatcattgcaggcaccttcagagaaagcacttactaaaggggtatacttgattccacatctgctttgacctgcaaatctcccttctcctttacatacatttgcatctcatttgtatgtcaatctaaatccactggcagagcctcagatcatcatctcaaagtcaggtggatgtggggctgggcaggcctccaggtgttcctcctcctgcttcctctggggctcttgatcctcctcctcttccttgctgctctcctcctcctcctccaatatggtgaccagttcctcccgcagcgcccccatctccagccccaggctgcacagctgtcccagcagctggacatccactcggcgcaggttcccctgccagtaggaaggggacgtcacagggatgccaccccagagagcaaggggtctctccaggacctgggtgagagcaggtcccaactcatgtcctggccacagcgcctgggcagggtcctcactgtgcccatggaccctaactgccttcctgcttctcagagtgtctcttgatctctaactcttctctttgtctctccatttcattgtccctgacttctctctctctgtctcctccctctcttatctatatctgtccctgtttccctttgtctctgtccccatttattttttgtctttccatgcccctgtctctctgtctttatgtgttgccatttctctgcccctgcctttggctctctttctctcgcttgccctctctctgccctccccaactttctcaaattcagtctgtctctccatctctgttcctgctctccgtctctgcttcccacctctgtccctctcttttgggatctccctgtccccacctctgttcccgtccctcactctatgtctgtctctcggtgtctgtacatgcctctcatgtctctgcttctatctctcagattctgtttttcgatctctggccttctctatttttgttcatttccattcattctcatttcctctctttctctttcccttccaaacccctcactcaccagctcctccctgatccacagcagactatcgcaggcacctccagtgtctgcccctgcagtcctgagggtctgaccagggatttccactggggagacctccctcagggcctgggggggtgggcccagccccggaggcaccagtccagcctgattcagctgcctccacagttccatcgtctctgagctatggctgcaaggagcaggaagtagcaaggtccagggtggcctggtcccctggggagctgtgtgcgtggtggagagtaaagggcagagggagtgggatgggggttcctgggaaaggtatcccaaagtccactcttcagagagaatcagctggccttgtgcttttctttttccttctgaagtctaacctcaactctgctcacagggttcaaacatagcctcttgcagaggtctaactccacccttccctgcctgtctcaggcctgacccctcaggggcgctcagtgtctgtagatgcctggcaccctctgtccttccacctgccccccaccaccacttctccagcctctcctcagcctccatttgacctctggcttgcccatagcttggtccttgcttgtcctcttggcacgggtcatcctagggctttcccaccagtgtgcctttgggggcaggaatggctcccaggggcaccaagacagcaatcccttagctggagtgcctgtgtccaggctgctggcctagggccaagcagccaattctgctgaccctggacttgcctatgggtatattatccctgttgagggtgagggcttctgctgtggaaaagtctgggaagcactgcaggcctctctcggccttggacccttccttcagacccaaggtgcatatatatacatatatataatggtagatcacgaggtcaggagatcaagaccatcctggccacatggtgaaaccccgtctctagtaaaacacaaaaaattagccgggcatgctgccgcgtgcctgtagtcccagctactcgggaggctgaggcaggagaatggtgtgaacccaggaggtggaggttgcagtaagccaagatcacgccactgcattccagcctggcgacagagcaagactccatcttaaaataaacaaatgaacaatatatatatatatgtattttgttttttgagacagagtctcgctctgtcatccaggctggactgcagtggtgcaatcttggctcactgcaacctccgcctcccgggttcaagcgattcccctgcctcagcctcctgaacagctggggttacaggtgcacgccaccacacctggcgaatttttgtatgtttagtggagacggggtttcaccatgttagccaggctggtctcaaacccctgacctcaggtgatctgcccacctcggcctcccaaagtgctgggattacaggcgtgagccaacgcgcccagccccaagtcccttttaccatagaaagtaacatagtcacagtgcccagggattcacaggtatggggagagggttcgttattcagctgccacacccaccttcctaaacctgctgcccttccagtttcctcacgtgcacagccacgcccgtctgcttttagtttctcaatctgttggcttaaccttcaaaacaggcccaggatttgagcacttctcaccattccctctgccccatccccattcatctcttgcctagactgctacagcagcctcttttactggtcccctgcatccacccttgccctctaaggcaagggtccccagtccctgggccaaggaccagtaccagcccctcgcctgctaggaactgggccgcacagcaagagatgagcagcgggtaagtgagcattaccgcctgagctccgcctcctgtcacatcagcagtggcattagattctcataggaggcaaaccctattgtgaactgtgcgtgcgggggatctaggttgcctgctccttatgagaatctaatgcctgatgatctcaggtggaacagtttcatcccaaaaccatccccaccccacccccgacccccagtctatggaaaaattgtcctccacgaaaccagtccctggtaacaaaacggttagggaccgctgctctaaggtacattctccacctggcagaaataatctttacaaaatgtaaatccgattttgacactcccttcttcccactgtgaatagaataaaaccctaccaggcctgcaccgtcagcccctgcccacctctcaacccagtctcctatctctgtctgcaagctggttcccacctcaaggcctctctgctctagaggctacctctccctgcagcgcttttcccctagatctttgaatggctctttccttatcattcacttctacttcaatgtcacctcttcagagaggcctttgctgatggccctacacccagtcacttttttttatctgcttctcatcaaaattgccttgctgattcctttgtttcttattcatcctctcccacatccatcctctcccagcccagaatgttgacttcctgagagagggactgggtctgtcctgctcaccatggtaacctcggcatctagaacagtgcctgccatcacgtggtaggtgctcagtaaatattcttggaactaatgaatgaataattctatccacaagacttcacaatggctcttcatgctgcgatctagctttcaactccaaactggtcttgagatctcacctcagtctctaaccttgacatctaacctcttcacccactctcttacctgaccctaatttttaaaaatgacgtggtcagcttttcagccccctcattccctgtttttaggaggtagtgagtggaagctggaagaataagaaagcttggggagactgcaattgcagtcaggaaagaaaggtactctgccgggaagaacaccccatcttctcctagggaaagattgtggagtcctggggtttgttttgtttttcaattttttgttttaagagacagcgtctcgctctgtcacccaggctggagtgcagtggcgcaatcacagctcactgcaacttcgacctccccggctcaagtgatccccccgcctcagcctcgtgagtagctgggaccacaggcgtgcaccaccacgcccggctaacattttattttttgtggatataaggttgccctatttctttgtggagataaaggctcccctatgttgcccaggctggtctcgaactcctggcttcaagcgatgctttcgcctcggcctccacaaagtgctgggttcacaggtgcgtgagcccgacctgtgtctcgttttgaagctcagggagagggcgctgtgagcaatccctaaaccctttaagagtaaaaagtgcgtgcacctttaagaggacggttagaaaacgcggggcgtggccacaggagaataagttcgcgctgaaccaggagcgtgggataagaccggccccttccggttacgaaaccttagcaagatggcggctccctgggcgtccctgcgcctggtcgcccccatgtggaatgggcgtatcaggggcatccatcgcctgggtgcggcagtggccccagagggcaatcagaagaagaaaaggacaatactccagttcctgaccaactatttctacgatgtggaggctctgagggattacttgctccaaagggagatgtacaaggtgcatgagaaaaatcggtttcgagacaaggagtggatcaggccagataagtatggccatttctctcaggagttctggaatttctgtgaagtgcctgtcgaagctgtggatgccggtgactgtgacatcaactacgagggcctggataacctcctccgcctgaaggagctccagtccttgtcgctgcagcgctgctgccacgtggacgactggtgtctcagccgcctctacccactggccgactcgttgcaggagctctcgctggccggttgcccccgcatctccgaacggggcctcgcctgcctccaccacctccagaacctccgcaggctggacatctcggacctccctgccgtgtccaaccctggcctcactcagatattggtggaggagatgctgcccaattgcgaggttgtgggagtcgactgggctgagggcctgaagtcagggccggaggagcagcctcgggacacagccagccctgtccctgcctagcctttagccctgtccccactcacgtggcttctcagcgggctgcatggaatgtctggtagctcaccacacttctggcttccatttgtcttcactcaacgtcagggtgggggagtggtgctggccaatcacaggagagagcgtgagttcccagtatttattcctggctgcccttggctaaaggtcacagctcctgtcaccctgtcaggcagccctttccatgcccctgttcaggcctggggaggtaaaggctcaggctgttagtagccgcagagagccacactcaccttgtcaggagactcttctcaaactgtccttatgtgagtgcactgccatttcttgcagggaccctgactgacacaggggctactactgacactttacagggatggttctcccccgtgcagggccgctgtgcccactgcaggacatgcagcatccttcgccccactccactcactaaaggccagcgcaccccaggccccatagtattgctggttatggatttattgactttatgttccaaattcagctttttcagttggctgtttgaagggtacttgcgggggccacaggttggggagggccctggttggggggctttctggcccgttgttcccccttttccagggtctggcccccctttggacctggtttttcccccgttgtcccttttcttaa

SEQ ID NO: 735329 - DNA, 187842 bp, Homo sapiens
ctccaaggctgagggatgaggagacctgctgaggacccagggccttatctttccatcccactccataggtcccagtattgactgatgctgtcttcacctcctagcctcacttttaaccttctggcacccgcccaccactgtccagttcactattgaagccctgccgtccagtgctgcagagggaaaggatgttcttctactggcctgcaatatttcagaaactattcaagcctattattggcacaaggggaaaacggcagaagggagccctctcattgctggttatataacagacattcaagcaaatatcccaggggccgcatacagtggtcgagagacagtataccccaatggatccctgctgttccaaaacatcaccctggaggacgcaggatcctacaccctacgaaccataaatgccagttacgactctgaccaagcaactggccagctccacgtacaccgtgagtgattcccccatacctctgggtgctggcggtcagttctgcttcacacacatgagattgtcaggcctgggctgtgcctgcatccccctctgcattttgtcccgtgttgagatttgggcatttagtgcaggacacacacatggtaggtaaacttcaacagatcagaattcctttcctgcatccaggccctgcagacactgatggcgggggcgggggggcctcagcagggggaggtcagtctcagccaagcaccccatgccctccccatgaacctgaccctgagaaagaccctggagaactgggtcagggcctggcctgagggcgtcctgggaacctcacaaaagcccagcctcaggactcctgactccgtgtgaccccgggaagcctgtgtcagggctggggtgtggtctcctgggcagggcttactgggagcaaggatttaccagatgtctgcgggctgtggttcctgaagcttctcatcagtgagggctcagctcccagagtctcatctagacaaggacagagcctaccactttccctgggactcagcctggagagggcagggggacaggattactagggcattggccccctgaatgaggagcttaagagatgcccttgggcagtcagtggcccaggggtaggaacagaggggagaaaatgttcctggcagcttcttgtccaccggggatcatgcccaggggtgctctcccatggaggcaaataacagatgctgttgatgtgaacacctcctctgtgccaagcttcatgtcagatcctgtgaataatttaaagttcattcacagacaaagtggcaagcctcagaccattttccatttacatattgtatggaggggaaactgaggcacagagagatacagacaccggccacggtgggcagatcgcagctggcagagtcacatgagggctgtctgcagctgctgccacgtcctctccttcatccctggtgccttactaggtgtctgtggaccttagaacagccactggttcggatgttttcttcttaggtgtctacagctcggagggggagattctggtctggagagttatgagtaaatacagaattaatcagttttttcttaactaaatcacctgcctcaacaatcagtcagtgctggggaagttcaggcctcctcgctcaggtccacaccccgcatctctggacatgaaatggcttcgtgtgttttctgatgtgtgggtatcattccaacaggaggataaaggggaggactttgctttctctccccattcacaccctgcaccagccagggcccagtgtgagacacatactccgtagttctctcatgaaggagggagggaatgaatgaaggaatgatctataacctcttcagagacagagacctggatacaagatcctaggaggttctgggcccaacgtgagacacacactctgtagttctcttatgaaggagggagggattgaatgtaggaatgatctataacctcttcagagacagagatgtggatacaagatcctaggaggttctggccacacctgttttctgtccctctagagcctaagacccatgtctcattcatctggcccgtttctcctaaatctgcccctgggagctgagtctcatctgaccctggggctgcagggctgtgggaaggttttcaggggagggatcaggcttgcgggtagtcccacacgtttgccttacaccctggagctctacctggttctcactatgaatatcccataataatcccccctatcctttctggggagtagaaaaaaagtaaatatttaaaaatatgccagagcatctgttcttcttagcaagttcagatagttattagttagcaggaataaatcgttattttaccagagcctcacctgctgggggtttatgggagcctaactgactgaggggggtgggaaatatccaactccagccccctctagccatcatgtcccacctaaaggagagaaaaaactgagaggcacttgtgacattcacagcccagggcacagactctatccaggaccacagaacccctccctccccccactcaccaccgcatcactgaacgcctgctcacccaagttcctgttgcccagtacatcatgtcctggctttcaacaaaaactacaagacagactagaggcaaaaaaaaaaaaaaaaaaaatgcagttcgaaagacagaacaagcatcagaaccagatgcagatgtggcagggatgtggcagggatgttgaaattatcagaccaggaatttaaaacaactctggggccaggagcggtggctcatgcctgtaatcccagcatttgggaggccgaggcaggcagatcacctgaggtcaggagttcgataccagcctggccaacatggcaaaaccccgtctctactaaaaatacaaaaaattaggcaggcatggtggtgggtgcctgtaatcctagatactcggaaggctgaggcaggagaattgcttgaacctgtgaagcggaggttgcggtgagcctagattgtgccactgcactccagcctgggcaacagagcgagattccatctctaaaacaaacaaacaaaaaacaatactggctaatatgctaaaggctgcaatggaaagcatagacaatgtgcagaacagacggatgctgtgagcagagagatggacaggctaagaaagaataacaacagctactatatctatctatctatctatctatctatctatctatctatctatctatctatatatatgtatatatatgctagagatcaaactcactgtaacacctggatctcagagtggttgtgaggatgtttattaggagattaaagagattaaagcagagttatacacagggcgagagctcaactgatgctatcaactagtattcttatttttttgatgttgttattggcaataaaatcaggaacaatgcagtaaaaatttggttttatcatgtacgagttctgtgaccttccttgacttactgaggtactgtaagtctcagattctaactctgcagatggcggtgatgcccctctccctcaaggtgatgtgaggatgagatgagctgtaggtaggttggtgcccactgtgcctggcacatggaaggcccctgaaaatagtcaatgaacatcatccccgctcatcagcatggagttgacagtgagggctcgctctctgtgacaatcatggaatggaaaagaagaaacaagaggaagactgggcgcagtggctcatgcctgtaatcccagcactttgggaggccgaggcgggcagatcatctgaggtcaggagttcaagaccagcctggacaacatggcgaaatttcatctctactaaaaatataaaaattagcctggcatggtggcacaaacctgtaatcccagctacttgggaggctgaggcaagagaatcgcttgaacttgggagatggaggttgcagtgagccgagattgcgtcagtgcactccagtctgggtgacagagcaagactccatccaaaaaaaaaagaaaaagaaaaaagcaacagagggaagaggtgtgacatgagaggaagaagggatttaaaggtacaggagcagggcgaggtgcaagcacctgtgggagaatgtaggagttggtacatcccagtgtgtcaagtctgagacacagaaaatggtgcaaccgtggagagcaagggagtcagctatgaggacagcccaacagaccacactcaggctctggagcatttccttcctccctgactatgcccctgccctgcaatgccccttatggtttcccttggaacaaacttgggccttgtcccctttgccttcccctttctgcagaaaacaacgtcccaggccttcctgtgggggccgtcgctggcatcgtgactggggtcctggttggggtggctctggtggccgccctggtgtgttttctgcttctctccaggactggaaggtaccgcagcttttccccagcctcctcccacccctaggctgaccccagtcagggaggagggagaccccgccctgtattcagggccaggctttccgcatcctcccaaggaatccttccctctcattccatggctcctcccttgccagctgctgatcctaggctgcctcttcctttatgaatgtggcacagttaaggttgcacccctgagtgctgtcctagttccctaacacagcaaagccacagctgcctggagggaggaagggagggagggagggagggagataagacgggagtgctcagaacctggtaccttctgctgttcattgaatttacccacccagtgaggagggatttgcaggcttgagatccatggtgggggtcctgggcatggtcacgcagtggggagtggcaaagcctggacaggctgggtagggtcagcaccccatcgtgattgatgtccctgaggtgtgagatgggagaacctggacctcaggacctgctgtcctttatgtctcttgccaaggggtggagagagagaggacaaggccattgccccatttcagcatctccaggcctgaaaggagggtctggccatggcagggatactgagttctgggagaatatgatacatgctccttgcctccccatgcccccagctcccccagtgtcctgcacacacagccggccctgctttccctctggggccttgacccttcctctcaggcaaacgcaggtggtctgattccctccctgagtcctcagtccctttcctgggtccctgggtcaatgttctcctcacccggcatctgcctgggggggtccttcctctctggccaggacagacgtgactgcttaaggcctatcctcagctccccgtcctcggccgctcctaccacgaaactgatggagacaggaggccttcactccagtccttgaaaatggagtcccttccttgtcctttattctgcccctaaacctgtgatttctccctgcaccctcatgaataatcctgacctttcctagggccagcatccagcgtgacctcagggagcagccgcccccagcctccacccctggtgagtgtcccttcagcccaggtgtgggagcccctaggcctgccctacggtgtccactcctgccagtcaccccctgggggcctctgaccctttctttggggctgcaaggaggatgtcaggaaacatgacacaggggaccccgactgtcttgttcagactgatctgtgggctctgggtcgtgggtcacctcctcgacctcagctgctcaggtctcccctgggaagaggctccctctccctgattctctgggagctgaggacccctacactctcctgcaggaggggcccaggctctcctcccaccctgctgctcactcctgtctctgtccccaggccatggtccctctcacagatccaccttctcggtaagcctgttccctccccagcccttttctactggggtcccaacagtgcaggctcagggcagggggaccatcaaccccacagcacagcactgacccacctttccccagaacagtcaggtcaaagtgagtgcctccagccaggatccgggcctctctacagggccaggaccacccacgccatgtgctgacccctccccgggaccctctacacctgaggagaaccctggagtccagcaggtgcagaatggacactgggaccatcagtcagaggcccacattaacaagggtgcggggtgggcccagccaggacaggggtcagggtgttgtgtccacactgggaggctgagctcaggggcagagctggtcaatcctgaggggaaatgagtggaagtggaggcagggaagtaagtcctggccgatcagagacaggaaccttccaggctgggcttccgtgaccctccctccctgtcccctgacatctcctctctcccctgcccaggcccctctacccagccccagaacagccactcccatctatgaggtgagtgtgggccatggatgttctggtcccgcaggctccaggggacccaggatctgcccccaccagcacctggctgagctcagattcaggaaaatgcagtgaaaatgagaacaggtggtggtgagcagaggagggaggggcctgggaacagggaccccctgagcacagccaggttcagccccagagaagccctgggtgggcccagagcctgggagatgccagacactgttctgagaaggctacaggggttgaggcctcttctctgtttttacaggaattgctatactctgatgcaaacatttactgccagatcgaccacaaagcagatgtggtctcttaggttcctctgggagctgctcttgtgggttgatggagcgtccccaaagctcccagccctggggacggggaaggacatggagcctgagccagagaaccagctctgagtcctgaggagacacaggcctggggacagggagggatgggagtccctgctgaatatctggagaccctgacaggttgccctgggctctgggtgggccgggacaaaggcctctcatcaccacaggaagcgggggcttgcaaggaaagtgaatgggcctgtggcccacccggggtcaccaggaaaggatctgaataaagaggacccttcctctcattggctctttttctgctcacgggaacttagcagaaactcacctgaaactccgtgtccattctctcccgggtcacacagggaaaatatctccaccttgtctcaaccacagtctctcttccctgggaggcagaaataggggttgggagtcaggctggggtgggccctacacaggaaagggcaagattcacatgagccctgcccagccagccgagcgctcagctgtcctcacactaccccagggaccaaggccatgcacagccccagcctgggtccctctgtgaatgcatgtggggtctcaggagcacagaagatggggccatctgatgtccacaaaaggtgagcaatgcgggagcaaccatgggtggtataggttgcggctgtggcccctacgcagcctccagtgtcctgacccctgctgccctcttcacccaggccctggaggcccagtctatcactgtcctccacaaatgaacttacctgtccccaaatccaggatcctgtgtgcttatacctggccactaggttctcctctgtcccagtggctactgctcaggacatctttatccctggtggggcacagagaggggctgtcagagcaaccaagattaatacagacgcataattcagtccttgagcactacccaggactctggcccctcattgctcatcagttcccactttaccccctggcatggatctcactgagcaagccaactctttacacaggagcatccaggtcagaggtgcaggactcccccatctaaagctcatgcaggctcccatggcgatgggacaacctgtctgctcctctccctggcccacagccctatctcgcctgcagctcctccacacacctgggacagcagttctcagcccttccctgagggcccctggaagggtgatgatctcatataggttcacttgaaccaggtgccaccttcccacaagtgagctggtgcctgcactaaagcacagagccacagttcccaagagtgttctgccactgccacaggtcccaagagtgttctgccactgccacaggttgttcgtcctgagatgagaggtaagaaaacaacccgcaatgggttgttttatatcgggatttgcatcaggatttagctctaaatgacccctgatcccacctgcacacagcgtcagatgagacaaggtgaggcctctttagttttctgttgaggctgtgacaaattaccacaagcttagtgacatagaaacctgaaccaaagtgcccacatggctgtgttctttctagaggctccagggaagagtgcatttcctctccttttccacctcctagaggcctcctgcaaccttggctgtgtcctctttctccatcttcaaagccagcagcacagcatcttgaaactattctgtgccctgcttccatccccacatctccacctcctcccacctccctctctcacttaaaaggaaggagccttgtggttattttggacgcacctgggataaaccacaacaacctccccatctcatgatccttcctttaatctgtaaagtgtcctttaccacgtgacatgtccacagatctggggatgaggatgtacacatctttgagaggcccttgttctgtccatcactcctctcaaggccatcttctcatcatcgttcactacaaactacacatgggcacctggatgggttcatcatgactgtggcgtcagttcctgcattaacatccccagcaccctccagatcctgagagagggagacggagggctctccatgcccctagtacctctccaccttcttcttggtgacatgcttagttgctaagaataacagaaagcggaggtgactgaaagatcacaactcaccggcccttcaatagttcgtggacatcagcaccacggacagtgactcagtgaggctaatttccaggtggcagcagggagcatgcagataggagggaactgcaggaaaagctgcccattctattctatatgagaaagagtgtaagaaagaggaagctattacagggataatgctattcttctctaatccataaattgcgaaacctttgcatgtctggatatcatggtttttagcacatctgctgccactccctgcagggctgattgctgcatccaggatgtggtctcttggggggctcacagcctgctttggcctcatggtgagtctccctgcccctgacactcaggccactgtctctgcctacaacatggtgggaaccttccatgattaacgtctgattctctgtgcctgacctttgaagcacatccatcactcagcctggagcatccgctgagctcagcatcctgctcctccatccccagctgagcccttgaggagatgcttgagaggatctcctgggctcctctgtgagctcctccaggctgagccttgtgcttggtgtcagaggcctttgccatctgcttgttctttccataggcaaataatcctcctcagggacaagtggggcctgaagatctgtctgaatatctatctatctatctatctatctatctatctatctatctatctatcatctatctatatgtatgtatatatgagaatgctttattaggcaaaactgcatactatgaacatgctttaaaatgcaacaggatgagatgtgaagacataaagaacaagtgtgtagtgacacatggctatcagaacacactgaagaatccacaccgcggccgagagcagtggctcacgcctgtagtcccagcacttttggaggctgaggcaggcagatcacttgaggacaggtgttcgagaccagcctgaccaacatggtgaaaccccatctctactaaaaatacaaaaaatttagccgggcctggtggctcatgcctgtagtcctggctgttcgggaggctgaggcaggagaattgcctgaacctgggagacacaagttgcagtgagctgagatcgcaccactgcactccagcctgggagatagagtgaggctccatctaaaaacaaaacaaaacaaaaagaatccacactgcttccccgcttcactttacccagaaaaggaatgttctaggccacttcctcttcagcacacatccccagggaactaaaataggttcacagtcacccccatcttcctcattcccatcacctcttacccacagaggcatctctggtcctacagatccagccctgccttcaagaggcacaggtccaacccatccagtgtccctgctagtcacacacagcactcagggtacaatggagggcttctgtgctttggatgggaacaaaccccacctcacattcccacacctgagaagccaccagggtcctctctgtcctgtcctcacactcaatgtctgtcctgggtcacccttgtcatctctcctggaaataggcatggctcctgacaggtaggattgaggctttgtcttttcaggagtccctcccactctgagcacatgaaactgctcagctccatgcaaccctctctcaccaggggccttgttctctgggtccctgaatacctgggtccatgccatgtacattttaagaaaaatgacagtgactctcaccctgacatcctcacccaaggcacgtgtctgacaagaatcaccaggtgagatacctgtggctccacacacctgaggcttcactgcgcaggggtgtcctcatccctctcctcccacccctagggacagtaagcaccacaggctgccttggaccaccagctccccctcccagacacagcctcagatctatactgacatgctacatggagaggctctgatgaacagcaggtattaggaaatcccaccgaaccaggtgccacttgcggccccactcctcctcatatctgtgactgggacagacacacataacacacctctgttcaccgcccagcccccaaggtcaatcacagtctgcttctcccctagatccactgctccccatgtcttccgtcctcagctgcatcctgggtggcctccttgctgttcttgtaccccagaggcaggttccaacctttgtgatgttgcctgcaatgcccaaactttcccttccccttccccttcccttttcccctcccccttcccctccccttcccctccccacccctatcccttcgtcttcccttgtcttcccttcccttccctataaagccaaacatacccatccacctaccttgtggtcaaagtcatcagcctcctgctccactcagtgttctctgaccctgcatatggaggtggtggcccctcctagaacacccaccactcactgtcagccttgcgtggtaatcacagattttgcaggggttacctgtgttcaggtgtgtcacctgtggaaccagaactcttggaaggactggcagagggagctgcttaggatatctcagggctcctggcatctggtctaccacagggctattaacaacagcacttagggacaaggtggaggatggacggttaagagggtaaatatggatgatgtgtgggcaaagaataggacacaggaacacatgcagtactcaaataattatgccaagaaaggtgaggacatggagatggacattcccatatacttctgatgggactgcagtttagtccctacagcaacattgacctcatcatgtttaacgcgcacacgctctgaccactatcctacttctgaaggcctccctgtgctgtgagctctgagaaggccaagcttgcctgttctgtctctgctaaagccagagaccagccaatagcccagcacagggtacttcataaatacatgttgaaggaatgagctccaggaacagtactccacatggtagagatgtgtgtatgaggatgttcactgcagaaggtcatgtcaatgtgacaagtgacgagcagcctcaaatccagcaacaggggtgtgggtaaaagatcatagtgtagccatgcaatggaaccaatgaaaaaaccacaattagagcaaatccacatgtattaataaaggaggtgccctccatacatgctgcacctaacagaatgttgccaaataagaatgaaaaatgatgatatttgggctgtaaaaactagaagtcagctaaataagaatgcatcgaaagtatttgtgaatgcttacaattttataatgccttggcatccgttttggatggaagttggactttctcataccagaagcagggctcagtcacctttgaaatagtttccagttctccacctccttccagttcctcagtgtgattgatcagatatctgatttatacaactgcctcctggtgacctcctccctatgggacttccggatacagcccgtatgactgccccactgaccccacaccctgcctgctgcagtgaccacctctaattacctggatctcatgtctgcttgcattaaatccaccaattaaaactccctgaggacaatctgtttgaataatattctgtaccctaataaaggccttgacccatgggttccccctctgtcctccccatactgcccctgacctctgtgtgtgtgtgtgggtgtgggtgtatgtgtgtgtgtgtgtgtgtgtcctccagacagggcctgtatcccccaggacctgtaagtaataaatctttattttcatcttatgtctctcgcaatcattggcaagagctctgcatcttaaagatcgcaaatttaagaaattggtgtagtcggcacaatagagtacctcttctgtttagcacaagatatctcggagctgctgaggcttttaacatcctcgccggtgtggctgcctcactggtgaggccgttctgttcagtgcaattcagttgctccactgtgtgctgctgtgttgctgctgtagagtgctgccatgttgttctccccaaattgttaccgagtaggaacctgtaatgtgctcccaaggtggtctaccccatgagaagggggattctccatctagggcaagggctaggtgtgtttctggaatcctaatagggaaggcatccacagagggtgaactccactcctccttagagtgaggagtgacatttcccatttattttccccatggaggtgccatgtattgactttttctttcactgtcccaaggttgagccaaggtgagctatggagaccagggcaagataccatttctgttagcaaagcaaatgggtgacaacgtgtggagaagctgtggttctcctgatggatatagcagagtgccatttagtaaaatcttgtcaggaggctgcccctggttagaccggcagtgtctgtagtcactaaggtggatgcgaattttaggccctgggccatggataatccctgcagacacagccgtggcttcatgtgatggggcaatcccgggctagtggctcccttgtttctgcatttcttgctgtggttgcacaatcaacacctcaggggttgattgggtcaccttggaaagagaaacagctgcctaggaggctggtgcacatggaggccaccctcaattttattctgctaacaagttgtaagattaaaacaacagggggctttgggtaccatcaggaacttgtcaagtaaacatccaaagacagaaagaagaaaaagaaaaagacattaaccgtctagaaatacaagccattttaaagattttgcttaaaagatgcgcttgggctgggagcggtggctcacacctgtaatcccagcactttgggaggccaaggtgggtggatcgactgaggtcaggagttcaagaccagcctgaccaacatggtgaaacctcgcctctactaaaaatacaaaaaattagcagggcatggtggcaggtgcctgtaatcccagctacttgggtggagaatcgcttgaacccgggaggcagagacggcagtgagccaagatcgcaccactgtactccagtctgggcgacagagtgagacttcatctcaaaaaaaaaaaaaaaaaaaaaaaaaagacgggcttgtttcgtcgttgtggagtcatcccagagagaggctactccctagagtcactgaccacctttcctcctccatcttttcctcttatcattctagagacagaaaacaagaatctcagctttaggtggctaacctcaccccccaagaaaagaaactaccactttgattgactacaaatccaagaaaaataaaagagaaactttaaaaagtactgagcaaaccacaggtctagcaaacataatgctagccctaggttacttattcatttacaacaaacccctagatataggaggaaaaaataaaaggtaattaaatatatacacatacaatattttaatataaatatataataaatagttaaattatgtatgtataatatgtaactaaatcaaagtaaaatttcatactttgattctattggaaattcaaaattcatttattaacttatatattaaggaatttatgtaaaaaaagatttttaaaagggcaccaatttgcttttgtgtctctacaacataggatctaatttaactttacatttgctaaatacactaattgacaaatattcatggatttaatcaatactggggctcaaattgtagccacacgtgggaatcccataaatttaaacactctgtccctattatcttgagaagaaaactaaatataaaattgaaaaaaacaggtatgtctcaatttacctgtaactttgcctaaatttcccggagtcatatacccattgctgtaaaacattctctattggacataggtgctctgagacaataaataaaatagaagtgtttttggtacttagacattggcttgacaaaatgggatcccatgaaacctcagttaagatagtgaatacggcccaatgtgagttgaaatggggcctttaaggattaaaacttattacatgaaacctagtaagtaatggggtgattatccatactgcttctccatttcatagcccaattttgacagttgtcaaatctggaaaaaacaaacaaacaaacaaaaaaacccctgggaatctgttgcctcacagagacacaaagtagacatcaaaattgtatatctcagttccagttccaaaatggtggcatagaagcaagctggctttactccttcacacagaaaaccaaaaacaaatatacagcaccaaaattattaccagatatattccagaactcaaatatgaaaatgaaacagttttcagagccacagagaagtgaaaaaaactcccgacagatgacaaaagaatcagatttccccatctgtaatgtccctccctgccccattctgcctggtaccaggtgtgtggaaaattttaccccaactcatggtttctacactgggaaatgtaagatcaatgcgggcaaccagtttctgcacaatcctgggttccctgtccctgccttaacccacaagaagcattgtgagtgcccgaagggagaaatttccctgaggacagtcaaagagtggggaggcaggactaccatctccttccctggaaactctgctgtgtaactcagccaagggagacatgaaatcagactggtgtttcagcagctccatgttgtagtaggtttgtttcacaggtatcctgggcatggacatctagccagctttcccacactgccaggatatcccctttgggacctccctcagttaggaagggcacactctgatcatttactagggccaaggtaaaccctaaaggtaacttagagatgaaaaggaggtagtgacctagcagtaaagaactctaagaaaatctatccaataaaaatcaaaacaagccagacaaagactaaaataaataatgaatccttcaatgtaaagacctggacttacatccacaagaaacagtaagcaggtaaccatgatctccccacatggacaaagtgaggaacaagtgactgatcctgatgagatggtgatgtgtgagctctctaatcaagaattcaaaactgcagttttaaggaaactcaatgatcttcaagaaaacatggaaaagcagttcagaaatttatcagagaaatttaacgaagggattgaaataatttaaagaaaacaaacaggaatcttggaattgagaaatatatttgctgaacaggaaaatttattagagtctctcaacagcagaatggatcagaggaaagaatcaacccaaataagactcccccaaggcataaaataatcgaattctcaaaagtcaagggcaaagagaagattttaaaacagaaagagaaaagaagcaaatggcataaagaagctccaattctgtggcaacagattttcagtggaaatcatacagaccaggagggagtgacatgacattctcaaaatgctgaaaaaatattgacatttgagaatactttatccagtgaagttatccttcaatataaaggagagagaaagtttcctagacaaacaaaagctgagataattcacaccatcagactagtcttcctgtaaatactaaagggtaaatactaaatacttcaatgtgaaagtaaaaaaaaaaacactaacatgcaaaacaaccacaacaacaataacaacatttgaaggtataaaatccactggtgaaattaagtacgtagacaaacccagaatactcaaatagtaattgtggaaagtaatccaatcataactctagcatgagtctcaaaatataaatctatcaaaaacaataatacattttaggaggccaaggttggcagattccttgaggtcaagagttcaagaccagcctggtcaaaatggtgaaaccccatctctaccaaaaaatacaaaaatttgcagggtatggtagcacatgcctgtcgtttcagctatttgggaggctgaggcaggagaattgcttgaacccaggaggtggaggttgcagtgagctgagattgcactactgcactccagcctgggtgacagagggagactctgtcttaaaaaaaaatagctacctgtttggagaaaggtaatataaaatatgtaaatagagacaaagtcaaaatttgcaaaggatgaaattaaagagtagagtttttttggggggttttctgtttctattattttatttgtgatctaagataagttgttaccttttcttctcttgaagatactttgttatatctatgtttttggaagtcttatggtaactgcaacgcaaaaaatctatgatagatccactgaaaataaaaaacaatgacttaaaacatactaccagagacaatcaaccacaaggaagacagtaaaaaatgaagaaaggaagaggggagttacaaaacaaccagaaaacaggcaacaaagtggcagtagtaagttcttacttaaaaatattgaacactgaatataaatggactctattctccaattaaaaggcatagagtggctgaatgctgcctatatgctgcctacaagaaaccacttcatgtaaaaagatacaaatagactgaaagtgaagggggtggaaaaagatatttcatgcaagtggaaaccaaaagagagcaggagtagctatactgatatgagataaactacaaatcaaagactataaaaagagacaaagaaagtcactatgtaatgataaagcgctcagttcagcaagaggagatgccaattataaatatctatgcatccaacacttgagctcccaagtctcccaagtatttaaagcaaacaatagtggatctaaaaggagagatagactgaatacaatattaattaggggactttaacaccctgctctcagcaatggccagatctttcagacagaaaatcaacaaggaaacttcaaagttaaactacacactagatcaaataggcctaactggcatttacgggacatttcactaactatctaactgttacagaattcacattattttcatcagcacatagaacattcttcagaacagaccacatcttaagtcccaaaaccagtcagaataaattcaaaaaagtttatatcacatcaagcatttgttctgaccacaatggaataaaactacaataaatgaataactttctggacacatacaacctaccaagatggaagcatgaaaaggcagaaaaacccaacaaaccaacatgaaactgtaacaaaaggaaaacccaggaccgaatgacttcactgctgaattctaccaaacatttaataagaactaaaaccaattctactcaaaatgctttaaaaaattgaagaggatggaacactttcaaactcattctacaaggtcagcattatcctgataccaaaaccagacaaggacaggacaaaaacaaacaaacaaacaaacaaacaaacaaacaaaaaaacactacaggattgcttgaggccaggagtttgagatcagcctgggcaacatagtcagaaccaatctcttaaaaaaaaaaaaaaagaaaaaaattagccaggcatggtggcatgtgcctttagtcctagctactcgggaggctgaggtgagaggaccaattgagcccaggaggttgaggccgcagtgagccatgtttgtgtcactgtactccagcctggggaacagagcaagatgctctctcaaaaacaaaaagcaagctgggtgtggtggctcctgcctgtaatcacagcactttggaaggctgaggtgggagaactgcttaagcccaggagttcaagaccagtctggacaacatagggggactccatctctcaaaaacaaccaaccaaaacaaagccaaaaaagaacataggccaacatcactaacaaacatagatgtaaaagtcctcaataaaatattaacaaaccatgtttagaaacacatcaaaagagatcattcactatgattaagtgagattcatcccagggatgccagtatggctcaacatatgcaaatcaataaatgtgatccatcacattaaagagaaccaagaacaaaaaccatataatcactccagcaagtgcagaaaaggcatttaataaaagaatgggttgagggagtggagcccatagtcagagcagcagtggtctgggattttggaagtagaaagaagggcagcaccactggccaggaccaccagggaacacccccataggccctgggtgttgtgctccagggagggttccctctggagttattaatcttggtgtccactttgcccagctgcccctcacagggtcagggaggatgaagggaaagcttccttctaatgaaagttcagggactcacagttcctagagcctgtagggagaggaagatcttcgaggaagagcacctgggcattggggcgtttgagaggaagatctatgccaggtccaagtggacaacctgtggactctctctccagggacatacgggtatctgggaatctcctgtagcttaaagaggtaaagacctctccctttagcctgaggactggaggatgctggttcaggtgaatgagtcctgcaggggctggtacaggcctggagggtggtggtgtccagggccttgggttcacccttagcatgattcaggccgggcggtgtttcacatgagcaagagggcctgggttcattgcttcaggacaatggtgaaatctcatggtggaagaaatcttgtccttgccagtgcccagctttcatttggtcttggcccagagtgtcctccctagagaagactcttgtcccttcttcacactgcccttcagggatatgccagccttatgggataagatggggtggagactgtagatgtgggtgggaatctctccacagagtgctccttctctcagcggttgcaccttgtctcagggcttcagcttgaaatctgggatctccaagcccttccctccccagtcctggccaggaccacatgggcagatgcattgtgtgaagtgcatttcatttggggtgtcctctctgcatggcaccctcccgttgattctctttgcgcatgtcagagtgcaggcaccatccacacctcctgctggaggagggacggagctgttgactcctgagagctgatcatgtgttcccaccctcacacacaatcatggtccatcctctgagggacatgtgttgccaccactgtggagatggtgcaactgacagtaacaaacagtaaaatctggtactgaatgggaccttaagccaacaatgacaatgtcattccaaggtgtttcatttttattgattcaatgcaagtcacctgatttcattgactattcacaatagctcgataaagtaaatgcatcatcaccaccactttaaagaggaaaaaggtgcttgggcagtttgtgactactgtggtggctgctgcattgctctctggtaaagccaagtaggtggtgggtgcggcctctgggctgggatgatccaccctcctggtggtggcaggggagccaagctggagccatggcctgtgcagtggtagcagctgaactgaccgctgctgcaggatttgcaagctgttacattttgcgaagccatgaagcacataaaacctcaagtagaacaagtgtttcaaagtctaccaaaatctgccttcagagattattactacagaggtggatatgaacccaaaatgacaaaacgggaagcagcattaatactagataatgaatgaacactagtaatagtagggtaagccctactgccaataaagaaaaaaataagagatgctcattaacatgttatgctcttaaatcacgcagacaaaagagggtctccttatatagtagccacaatcaatgaagctaaagatttactgcaagatcaagctaaaaacagtaggtgtataatgaatttttaacttcatattagtttatgtatatgaatatcaagtttttataataaaatgcctccaaacaaagaatatttgatttagggtttaataacttctaagaggggactcagatgtttcctgtttcacagtcagtctgagagggtcatttttcctggagctgacctgggtggaggcctcacactgatactccccagcatcctctctcctgatggggtttatgctgagcatacagtggccctgggacagctccattctctccatgagtcacagacgctggtcatggaagatccactggataaggttccagagtcatctgtggggcaggtcaggatcacaacatccttttcttctgtgactctggtgttgctgactcagatggggtcggagccactgaccctgtggacaatcagtggaggtgctcaactgaaagtgggctgagggcacgtcttctcctccatccctgggtccttaaggtaactgtggaccccagaccaactgacacaggagctagaaagaaattatttaggaagttagtgagggtaagagcgtccttggcaaggtttcccctttaacaaaaagcagcccaagataattccttttctaacaaagagcagcctgaaaaattgagctacagatgtagatgagcaagatggaagcttgcacaggtgaattccagtaggtgtgccaatagaaaagggctgcctggaagccaggtatgttcaacatggagactccatcctcccttttctccattaccacatgtacagtaaaaaaccaggcaacatggcaccggccaggtagacaatccatctgcatgacaaaagatcagagtggggcagccagcaaatggcacagctggtctaaacaatctttcaccccctgtataaatcagacactgcctcctgaagctcatctataaaaccttctgcatttcactatggaagtggcaacccattttccccaggacccctctctctgtgcagagagctcttctctttctttcccctatgaaacttccactcttaacttcactctgggtgcctgcatcctagttttccatggccatgggacaatgaacctcgagtattaccccagatgaatgatgctgtttcacaatcactggttcagctcccttcttcttagggtttcacagctcggtggggagaataccacgcctcagtggtctggggagtgaggaacaaatgaagaattaatcagattttacttagaacgctatcacctgcctcaaccatcagatccatgttgggaatgtccaggcctcctctcttagatctatacccacttcactggacctgaaatcctgtgtttcccgatgtgttggtgtcactcctatgagaggataaaggagagaactttgctttctctccccactcacaccctgcacaagacagggcccaatatgagacacacactcgctcagtagttctctcatgaaggagggagggagtgacctcgagtgattctgccatctgtagtctgtgtaccctggccagtggctgtatcttcatatgcctcagtttcccctcagtaaaataggacacacaatgagaactaaaaataaaattctaattccccagtgaactgaaaggatggcctcttggccaagcggatcccagagttcctgatcatgacaggatgggaggttacacctcattacagcccctccctttggaagtttagaggtgacaactgactagcattaacgctaaaatcgagatcatgagactgacagaacagactctctgtggccataagataccaaattataaactcaacctaaggtcatgcaggcaagggctaagccacactttcctacatttaaagaataagctatgttctaacacagaattttctttctctctagcggctaaagtaacactagccttcgagataagcaatattgaaatgatcgcggctcatccaccaacactggctaactgacccctgttccaacagccacaactacacttcaattggacaggagactgatttcagtaactttctcctaataagagaccactgagcatggcctggttctgctggtatacagacacggtgcactgagtaccataatgcttgtttcatcttttgatgtataagacctaatttaatacatttaaatctgaattctccaccccaaagtgaacatggggtgcatgtagcatgcatgtttgttgatcacgcatgtgcgtgtacttcctttgtgagtatccatagctccacctataacctgttgaatatgtatacctggccaactcattcagcataaatctatcttccacattcccctcccttgaagtgcctgctattggtctctgctggaggctgcatcttctaccctggggaatggccagcctgcaggctgtaaccctgtgtaagaaataacctggttgggtgcagtggctcacacctgtaatcccagtggtttgggaggttgaagtggtagaatagtttgagctcaggagccagagactagcctgggcagcatagcaagatcctgtctcttaaaaaaattttagggaggagagtgaggatcagaaaaaatacctattggctattatgcttagtacttggatcatgaaataatctgtataccaaacccctgattacatatataacaaacctgcatgcgtatctttgaacctaagataaaagtttgttttaaaaactatctgggtgcagtggtgcatgcctatagttccagctactcgagactgaggtgtgaggagtgcttgagctcgggggattgaggctgcagtgaattatggtcccacctgtgagtagccacttcactcaaacctgggagacagagcaagaaccggtctctaaaaaaaaataaaaatagaaaaataaaatgaaaaatatatgaaataaagtctcctttccaaacgtacagatctccgatttttctgccaacaatgataaatggtcagtggcttgccatgttgtctgtgaattacttttaaaatattcacgatcacctgacctaaaggttggtaccaaggaaccgcctgaatacaccgtctctgattatttgcctccaacagagtgttccctgggcctgatctctggtggacaatgagctgctgggaacatcctctcttctctattcctcccctggggatgctgaccttcccttggagtctcctaagttccccagggcagtcggctaatgtcctagggagcttacctgtcttctccataccaagtctcatgtgaaggacgaggctttgcccttgcccagatgaggctctgggggctgagccctggctggctaccagctgcaagagccatggcccttggacagctggtaaatccttgttcccagtcagccctgcccaagatgcctcaacccagccccggcacaggcttcccagggtcacatggagtcaggatcctgggacaggggactggacaggggtttccagggctgagtttctgaacaggggcttcccaggggtcccctcactccaggatctgacatggtcctacaaggaacgtccatggggaggggacccaggagggggaactgacactgacctccccttactgagcctccccccaaccccatcagactgtccttcctctgtagcaagtgcctgcagggtctggatgcaggaaagaaattctgatctgtggaagtttgtctcccctgtgtgtgtcttgcactaaatgtccaaacccccaaatgggatgtaatgtagagggggacacaggcacagcccaggcctgaaaatcctgtgtgtgtgaagcagaactgacccccaacacccagagctcatgagacatcactgtgtacgtgaaactggccagttacttcttcattcacaagatctgtttttatgacttgtagggtgtaggatcctgtgtcattgttggtgacattctgtatcagcagacatgtattggggtatattgtctctcagcctctgtggcaggtcctggggtaattacttgagttcctagtacatatcctgtaattcccctttgtaccagttgtagccaagcctaaggcagattgtgggtgagtggaagaatctccttgccttctgcagcttcaacagtgacttgggcagtggtaggcaagttccagaaagttaaaagtgaggctaggagtggggagagagcatcagttaatactgggccctatgcattgaggtggaaagatggggccctaggtcctggacaggtctcttcatccctcagccttggagtgtgtgtgtgtgtgtgtgtgtgtgtgtgtgtgtgtgtgtgcgcgcgcgcgcgtgcgtgcgtgtcctactgggccaaggtcagcagcatgacctcccttccttcagtgcctctgaccttggcatttccctgtttggagtccttttccccaggggtctgcctggctccctccctactgccttcaggtcctgctcacattagggcatccttgggagaccccttccctgacacctctagagaccctgggtcttccctttctgacctttcgctgctgtgttccctccagggctcttgtcaatacttgacctcacattctagatacccttgcatgtctgtcttcctccctatgagagcatgagctctgtgagaacagggacttgtgtgatcttggttgcaccccagtgcctgggacaggctgcggactcctgtggatgagctcatgagtgttcccagggcccttcacaacgtgggatttattttccaatggctgaggttgttggctaagagctctgttggagttcaatcaggctggtgggaaaaatattagagatagttatagagatagacacaaatcttcttggaagaccaaaaagtttgcataactttggtaatagatctgactgaaggtggtccctttacctttagttaaacaaattaaagtagtaacaaaggaaggcagagtagtttgtctagccagcttgtttactcatgtgatcttaagactaaccattgatgtgccacaggtgcttaattgctttctacttgggaagtccacaatgtcaattaccctctaacggtgttgactcaagcctttgttaattaatcttactgaataaatatgagtctcactagctgatcaaggccatggtcacaactgtttataggactcagcagggagtctgtaagcggccctgacagactcagctggactggcaaagcaaaatatgtgtgtgtcagtgtacactattcacccgtcccccacagctggtgcccctatatgaggagtgctgccacagagctctgtttagtgtcccttgttttttttcttgagtattaccccaacttaaattgtgattattgtcatctgttttcaacattaactgctcagtgatgattcacttggaaaacattaacaatcgagattgtttcttcactaacaacctcagattatttagattttcctgttgtaatcccttcttcctgtttagtgtccaacagaagccctctgtccctctcaggtccccgttctctccaagaaaccccagccagtctctgtgctccctcctcccatccactcccagggagccctcccctcacctgtgagcagaagcgcctgccagggatgtgcactctgtgaggaggggctgagggaggccccatgggctctgctgtctgctttgtcctcctctgtggagaggagcttgggcttcagaaaataaggaggccagaaagtaaggaacaggctgagaaataatggggatgtgtcgaaaggtcacagatgccaacatctttgtcctatgcaatattatccataaaattacaggtttgagatatgcttaaattttcttctaacatgcattaaaataaacatataacttttaatagttatattaaattgtatttaatataaattaaatgctcttgtcagagctactgtgactgtcagctctgctgtccttcctctctctgtgctaagcctcctcccagggcagaagcacttcccagggccaggggtgggggcggggaaaggtaagtggcaatgaggatctgcacaggtagcctttccgcctcctcccctctcagtcctgcctccttgtcttcttttcctctttttctccaatctacatttcagttccttagaccacgctgtgagaagcaaggcttattgggacccccatcccttaacaggatgacctgtgctccccataagtgacctctgctgtgtctagggattggctctgtcagcacctcacagagagtccctggggcccccaaactcagtgttattttctctatgacacagaaacccctctgggtatgcaaggttttcctcatgttttctaatgtctgggaaggttggatttactcccagcagggaggtcacagagatgtccagggagtggggtcctagaaatggacaaatctagagctaaagcccaggtctacgattttcagttgtttttttctgcagtgctatgtgaccctaatttcctaggagtaactaaaatgcaaacctcagacatttgtagacattttatgatttttctctacagcttgtaccactgttattattatttgctttatgctttttcctaaataaatttactttacaaaacatccttgtcctagtagggtgcaggggctcacgtctgtgatctcagctgcttgagaggttgaggtgggtggattgcttgaggacgggaatttgagacaaaacatctttgtcctatgcaatattatccataaaattacaggtttgagatatgcttaaattttcttctaacatgtattaaaataaacatataacttttaatcatcatattaaattgtatttaatataaatttatatacaatacatttttatataataaattatatatataaatgtatatataatagtttttcttttttgagatggagtctggctctgtctcccaggctggagtgcagtggcacgatctcagctcactgcagcctccgccttctgggttcaaacgattctcctacctcagcctcccgagtagctgggattacaggcgcctgccgccacgcccagctaatttttgtacttttttagtagagatggggtttcgccatgttggccaggctggtctcaaacacctgacttcaggtgatatgccgcctcggcctcccaaagtgctgggattacaggcatgagccaccatgcctggcctatatattttatataattatataaagttttctataataaattttatataataatatataaaatggatatttatttaagataaagttattagttttatatatttacatatatttaggaataaatgtgttactgtgggagcccagtgcccaggcaggtagtcagtacatgatggttgtcattagggttaatactttggaattctggattttttcccaagagagtgtctacgctggaatattgggcttgtggctttctgctgatgtgcatgtgtgaagaagctacttccacttattaggacttgtgtatctgtctcgcagtttcactacctattttctcgtgatgttggtcaagtcgcctaacttttctgtgcctcatttacctaatttgtagaatatgggtaacagtacacaagtgtgagtgtgtatttcccaggactgaccactagagggcgtgaaggcaccggcacttactattacagcaatgggtgtagtagtgctcatggtcgtaaacatcattctcccatgaaaggaaccagggcttcctgggagaaataactgattccagggctggggccggaaagcacaagcggagcctggagcatctcgtgaggccagaaagtaaggagccggctgaaaaataatggagatctgtcgaaaggtcacagatgccaaccagaaggagctttgaatgaccaattttgagacaaaatgagcactataagaaataatgatagtaataaattccaacccataaatacccatgagttcctactaatataaataaataattgaatacataaatatataaggatgaagaaacagctttttcttacagcagaattccaattaatgaatgtagaaggaatgatcaaatagaaaatcactatttggctaacagcacagtcaattgtttgtaggcaagaattatcaatggactttaaatatgaatgggtaaaagtatgatgatgctacaactagtgagtaccaagggggaaaaaaaagtacgttgagaagaaacaggctacttccatattcccaaagtatcacttcaggagctacttattgattataatgggacaaatagtaacttacagtagagaaacctggcaacagagtctctccgaggtacaaaggctctcttcaggaaggaggtaaggggaaggaagaagaaaacactgtcctgcctcaattatttgctttccccattctcaagtgtacttcatagacattcaaagatatgtgttgatagtgtccacgatccacatggctctattatagtcatttattcacacatacattcagtgaggctttgagtgcctaatgtgtgcctgatatttgctagatggtggatgctgagaagatcaggtgtgctgctgtctctagggtgactgaatccacctgccccactttacagatgtggaaattaaagtgaaaaggatttataggattagttcactgtcacaaggtcactagccttaaagttacaggagtaaagcaagtttcctgacttgctagattttctgctgcaggtgctgacaatggtgagctccaataggagagaggacactcagagtgaagtgggagccctgaacaccctggattagccaagaggacatgccgggtccagctgtgaccgcacaaaggaccattggggatatttgtattctctttttcacttagagcttgaaatgaggaaaactaagtgcagaaaaccaagagtggaagatttttcacaaagcactggtaacatgcatcagaaaaccctgtgctgatgtctgtcacggtgtttctcactgaacggtaatagtctggctttgagtgtgttccctctacagcctggagttctgcgaggcagggaccaggtgtgattcatctttgtctctccagtgacagtacacagcaggctctgataaatatttcttacaaaataaaatggaataaaaagtagacatctgcacaggtgtgggatgactgagcagcagcagaagcaggaaaagtcagcgtccccagatcagctgatgtggtgttcggattctagataggggtgaggtgccaggatggggatgggggtcctgtggctctgctgccctgggggacacccctaggtttcacagtgcctgctgtggttgctgcactttgcttccccatgggaaagtgatcagagggtgtggggcttcaggtgaccccatgtgggaaatggccaagggaaggtggggtgggcggcacatggttttttttaaccaatatttgaaggtaggttgtatgaaaaggtgttaggcttatttcagcttatggggagtaggacagggattggtgagtgtgtatcaggtatattttggctcaggatggaaaagaactgtcacagtaacataaggtcttttgggaaattacatgtttactggcagagttcaggccagggctgggtgtctgaaaatacctgtcagggtcacttttatggttacaagggcagagcttggcttggaaccaggtttcttactaataccacatattaagtattataaaaactgtcctttgcaataggacattgctctatgatgcaggttgaggtccctctgtttaagtaattgtgggtggctgtgattctctcatctagtctgcgacttggacttcacctccatctgcagtccctctcctttgctgttgacactggtcagagttaagcgcatttactgacgatggtcacagggtggcagcactgcctctctggtattttctaaaacctcttcctggaactgagccagtctaagaggatgtcatgactaagaaaagggcactaatgaggtgaacagataattttttttttcttgtttctcctgtgaagtaacagagtggaggtgagcatggaataattgccttttagaaatggaagacaatggagagaagtgtttcgcaaaccttaatgtgttcacagatcccacacagatctttttattcaatacagattctgatttttctggtgaggcctgagattgtgcatgtctaaggagcttttggatgatgccattgctgctggttggcggaccacactttgagtagcaaggctcgaagatcatttagaggttaattctcactgcatctaatttatggatgaaaacaaaccaaggtccagagagagcatatacagcttgcctaacaaagccattccctaagtgcctgacttcttgcatttaaacccagggcttcagcctttgtccagttctcactccacacatcacacggtttgttcactgttgtgaacgacagttgtggcagcatctctttagtttaggaatccagagccccaatttcactaccctctttggtcttggctcatgctgtgacttcgaatagttttgcccttacttaaaatcttcagtggctcttttgtaatcacaagatcaagttcgaatatctctgtctagtgttcatggctttataacatatggtatctctttagtaaccttacctaacttccctgttttaaaattgtctcttgctgccatagccctccttgctccttcctgctccctaacaaactgtgttcacttctctctcagtggtagtgatgatggcatggcctctgatgttagactcatgtaacttctaatcccagatccaccaccaacattggcaagttgattcatctttctgaggataagcatcctcctctgaaataaacttagatggcggttgagaggggtaaataaaataacacacaaacccactctcatccctgagaccctcttcaaaactagcatataaaaatagctatttgaagaggttcagtgaaattcaaggtaacacagagaaggaattcagaatcctatcagataaatttaatagactgaaataatttttaaaaatcaggcagaaattctgtagctgaaaaattcaattgacaaaccgaagaatgcactaaatctttcaacagcagaattgatcaagcagaagaaagaatttgtgagcttgaagagataatatatgaaaactcagagtcagagagacaaaagaaaaaagaattaaaagaataatgcatgcctacaaggtttgattattaagctactcaaagagatacaagagaagggtgaaaaccaacataaagaaatgtaaaaaacaatcagaatataaatgaaaaattttctaaaatgctagctagtttttttttgagacaggctcttactctcatcacccatgctggagtgaagtggcacagtcatggctcactgcaggctcaacttcctgggctcagatgattctcccacattagccttccaagtagctaggactaaaggcgtgtgccaccaggccaggctaattttttgtatttttagtagagatggggttttgccatcttacccagggctggtcttgaactcctgggctcaagtgatccaggagattcactgccaaaaaggatataaccaagtcatatagtcataggttatctaaagtcaatgtgaaggcaagaattctaagagcagtgagacaaaagcatcaattaacttataaaggaaaacctatcagtctaacaccagatttctcatcagaaaccttacaaaccagaaggtattggggtcctaatcttttggcttcttaaacagaatagctctcagccaagaatcttgtgtagagtgaaattatatttcaaaatgaaagagagaaatacagtctttttcaggcaagcaaatgcttcaggatttgtcacggctagaccatcctacatggaatgttaaagggacttctaaatcacaaaacaaaagatttaaatagaacagaatagaacctcttgaaaccaaaaaattcaaatggcctataaaacaataacacaataagaaaacaaagtagataacgatcaacatgatgactggaacaaatattaacattgaatgtaaatgacctaacactccacttaaaagacacagattggcaagataaataaaaaatcacaaaccaaatatcagctgtcttcaagagactcacttaacatgtaaggattcttatagactcaaggtaaagagatgataaaagatattccatgcaaatggaaaccataagtgagaaggaatagctatccttatatcatataaaacagactttaagcaacaacagtaagaaaaagacaaataaggcaactatataatgataaaaggatcaatcaaacaagaagatattacaatcctaaatatatatgcacctaactttggagctcccacattcataaaacggttatgatgagacctaagaaaaaagatcaacacaaaacagtgagggtgtcctgggttttctttttattggacagcagtgtactagcctatcactttcccagtcaggggatttttggtctccccattcccctaccatgggttcatgccaaagtccatattttttattagtgtttggaattggattttttttttttgaggtggagtctcgctctgttgcctaggctggagtgtagtggcacgatctcggctcactaacctctgcctcctgggttcaagcaattcttctgcctcagcctcctgagtacctgggactacaggtgcatgccaccacacccagctaatttttgtatttttagtagaaacgagatttcaccatattgtccaggcttgtatagaactcctgacctcatgtgacagggaaacaggcactcagtgaacttcatgcgattgaggagttaatgataatgagagaagggctgtgaggggacagcactggggacaccagagcctgtgacgggctgagttgctgtgccttgggagatgcccttttgactgagccctgggaaggagggggtgtgggggcaggagctgcctgcagagggagtggcctcaggtgggcggccacctggctgcagggaagaggtgacagagttcgtgtgcagagcttggagggtgaggaggaggtgggttgaggtgaccttggtgagggtgaaccatggggggctgtgggccctgctgagggaggccagccagccctggacctacagggtggtttggtcttttttgtcccattcccagcatccactgagtggtgaaactctgcaggccagggaccatcccactggccagaaggagcgcacagtaggtgcccactcagtgcatgttgggctggacagaacctcactctgccccctgcccccagctttgggagctgcagcaaggtccctccccctagggatctccatgcctctgtctctgaggggtgagatggggagacttcaaagggccatctcagagtgtgggggatagagacgcagaagtgtgggggatagagggaggcctgggctctagacccaaaggaccttacacacctcctgagtcttttcaaatggtttcttctgttactttaaaaatgatgtaagtcatcatatttattgtaaatcccaggaatctaatcatgcgtaaaataaggtgtcttatccttgaccccaccccttccccaattaaatttccaggatgttaccactgtttgcagttggtgtgaatctctctttaataatactctgtttatctcacttgtcgttttacgccaaaatacccattgaattatattattgctgaagaccattcttttttttttttttttttttgagatggattcttgctctgttgcccaggctggagtgcaatggtgtgatctcggctcactgcaacctctgcctcctgggttcaagtgattctcctgcctcagcctcctgagtttctgggattacaggtgcacaccaccacacctggctaatttttgtatttttagtaaagacagggtttcaccatgttggtcaggctggtctcgaactcctgacctcatgatccaccctccttggcctcccaaaatgctgggattacaggcatgagccaccacacctgcccagaccattctgttctactgaatcatgtgtggtgggcacctcttatatcaatacatatggattttatcttgtgtttgttattggctcccctttttctcattgcatggctacactcaatgctttgtccacacccctgttcctgggttggaatcttgtgacagaaaatgaagtaacaaaggctaaagctttctaaagtggagtcaggagattgcaagacaattgcactttcaccagcaagagctcaaaccacagaatgttccaatagatttggataaacagctgaagtcagtattcaccagccttcaacatctcaactaggagaaccctaaaattaactaagcacatagaatggaatggacttgtgatttaggattccttctcagccaatgagctgcttctgaaaacaactttttgtggaaattacctgtaaagaaaaccctctcctgtgcttgtcttacagaacactagtcagggctgccctgattcagtggacccgaattgctattatttgtttcctaaacatatggtattttctgtgaccttcatctcaatcttttttttaagttactgggctgtttcccagttttcataatgacgagacattctgcagtgtttcatacacatgtcttttccccatgtggagtattgatccaggagctcattcagtcaacgcatgtttatgaagcatcctgtgccaggctgtgggctggtcactgtcttcagcagagagaggacaggcacagtcttgccttcacagagctcacagctcagggaggctcttagaagtgggatactggtcggagcatgtgcacattaaacatgatgaggtcaaggttgctatagggactaaaccacagtcccaccaagatcgcattgagttcctgtggtagaccagaggtcagggcccctaagatgtcctgagcagctccctctgctcagaagttttggttccacaggtgacacacctgagcacaggtgacccctgcagaacctgtgattaccacccaaagccaagagtgagtggtgggtgttctaggaggaaccgtcacctccatgggcagggttggggaagactgaggggagcaggtggctgatgactttggccagaaggtagggggatgggcaggtgtgcgctcatagggaagggaagagaagggagggcattgcaggcaacaacacaaaggttggaacctgccttcatggactgagaaaagcagggagtccacccaggctgcagctggggagggaagacatggggagcagtgggtctaggggagaagcagactgcgattgaccttggggactgggcagtgagcagaggtgtgttatgtgtgtctgtccccatcatagatatgaggaggggtgaggccgcgggtggcacctgggtcggtgggatttcatagtgcctgctgttccctagagcctctctgtatagagggtcagaatagatctgaggctgtggtctgggggaaggggctggtggtgcttaccatctctaggggtgggaggagagggatgaggatgcccctgagcagtgaagcctcaaggtgtgtggagccacagttgtctctcattagacatgtgttttgcgtgaggatgccagggcctggtggttattactgttgtcaagtttgcatgacaaggacccaggtatccagggatccagagcacagggcccctggtgaggggatgaggctcagatggggctgaccaggttcatgtggtcagagtgggagggactgatggagagacagagcctcaacccctcctgtcaggagctgtggctatgtccaggagagatgacaaggatgacccaggacattgagtgagtcattgagacattgaaggtgaggacagggcagagaggaccctggtgactgctgaaatgtaggatgtgaggagggctctgacccatgcaagttacaggacctccccacccccgagcccacagatgacccttaaattgggcatcctgagtgctgtgtgtgcccagcagggacactggataggctggacctgagtctctgtaagggcagcgctggtctgtaggaccagagtcttctctgtgggtgtgacgtgggcaggaattagcaagatgggggtgacaaggcttggcttggaggatctggtacagaagcccatgggcttggtcagctcagcttctcaggggctcagctggggctggaggagcaggatgctgtgctcagggcatgctccaggcagcgtgatgtgtgtggttccagggtcaggcacgggggtcaaaaattaaccatgaaaagttcccaccttctgtaggcagagaaaatggcctgattgtcagggtcagggagacttaccatgtggccaaagcaggctctcagcctcccagagaccacaccctgggtgcagcactcagctctgcagggtatggcaatagatgtgccaagaaccccaacatccagatgcatgcaaaaattttgcgatatataaaatagagcagatcaagtttccctgcaataacgttgttcctggttgtgtctttttcttgtaaactagacatggacatctttccagcagtctgttctcatctgccaccttcctgctgcagcacctcagaatgaacattcctgagacactgtccgtggtgctgacgaccaagagctatggaacagagtgtgatgtagaatcttctagttacctctgctctcctttcacttttaacaacagagcatcattaacaatgagaaggtggagaggtgttcaggatcttgaagtgacttctgtcttgctctcccataaccctgaagctgctgtagacattattgcagaaactgacaccacagtcaggatggccttgtccaggagcccatgtgcagtttgtagtgagcaaggatgagaaaatggtcttgaaaggggtgatggacagaacaggggcttttcaaaaatgtcacatcatcacccccagcatccgtgaatctgtcacatggtaagagaccttacagattaaatgaaggattatgagtttggaagattattgtagtttatccagatgggtccaacataatcacagaatcccttccttacaaatgagagagggaggtgggagagtcagagaaggaggaggagatgtggggatagatgcagaagacagagcggtgtcaagatgctgcactgctggctttgaagatggagaaagaggacacagccaaggatgcaggaggcctctaggaggtggaaaaggagaggaaacgcactctgccctggagcctccagaaagaacgcagccatgtgggcaccttggttcaagtttctgtgtcacttagcttgtgggaatttgtcacagcctcaacaggaacctacagaggagtcaccttgtgtgcaggtgggatccagggtcatttacagctaaatcctgatgtaaatattgcaggttgcttttcctacttcctatctcatggccaacaaccctggacaatggcagaacacccttggaaaccacggctctgtgctttagtggagggaccagcttgtttgtgggaaggtagcacctggtccaagtgaacctacatgagatcgttactctccccagggccctcagggaagggctgagaacagctggcccaggtgtgtggaggagctgcaggtgaggcagggctggaggggcctgtgggtccaggtagaggggcagacaggttgtcccatcgccatgggagcctgcacgagctttaggttggggaaccctgctcctctgacctggacgctcctgtgtggagaggaggcttgctcagtgagatccacgccagggggtaaattgggaactgatgggaaatgaggggctagagtcctgggtagtgcctgggaggaccttgctcaaggactgaattcttggtctgttcccaccttggttactctgacaacccctctctgtgtcccacggggataaagatctcctgagcagtggccattgggacagaggagaacctggtggccagagctaagcatccaggatcctggatttggggacaggcaagctcattgctgggggacagtgatagatacggcctccagggcctgggtgaagagagcaggagggctcaggacactggaggctgtgtggaggtcacacccacgatctgtaccacccatggatgctcctgcattgctcacctttgtgtggacatcagatggccccaacttttgcactcctgagacatctcatgcattcacagagggacccaggctggggctgtgcatggccttggtctctagggtagtgtgaggacagctgagcactcagctggctgggcaggactcctgcgaatcctgccctttcctgtgtagggtccaccccagcctgactcctaaccccctactcctgtctttccagggaagagagactggggttgagataaggtggagatatttttcctgtgtgacccaggagagaatggacatggagtttcaggtgagtttctgctaagttcccatgagcagaaaaagagccaatgagaggaagtttcccctttattcagatcctttccaggtgaccccgggtgggccataggcccattcactttccctgcaagcccccgcttcctgtggtgatgggaagccttcgccttggcccacccagagcccggggcagtctgttgaggtctctatatattcagcagggacccccatcccttcctgtccccaggcctgtgtctcctcaggactcagagctggttctctggctcaggctccatgtccttccccatccccagggctgggggcttcagggacgctccatcaacccacaggagcagctcccagaggaacctaagaagccacatctgctttgtggtcgatccagcagtaaatgtttgtgtcagagtgtagcaattccagtaaaaacagagaagaggtcttgacccctgaggccttctcagaacagggtctggcatctctctctgggcccacccagggctactctgggactgaacctggctgtgctcagggggttcctgctcccaggcccctccctcctctgctcaccacctcctgttattttcactgcagtttcctgaacttcagctcagccagatgccagtggggacagatcctgggtctccctggggcccaagggaccagaatatctgtggcccccactcacctcatagatgagagcagctgccctggtgctgggtaggggaatctgggcaggggagagaggggtgtcaggggacagggaaggattcctgctgtgtaggaattccagggctctcctcaggtgatggagggtcccagggtggggttagcacagggagtggatgatcctggccctgaacagaggcccagctcatggccagggcaggtctaaccttatccaagtcattctgggtagggtgggtttgtgctggggattgacagtccccctgccctgagcctgcacagctggggccccagtggaaatgggattgggaacggacagtcttacctaggagatggagctgtcagagggtccatggcctggggacagagacaaaagtgagcacgagagtgttaggatagctgggcccctcctgcaagagtgtgtgggggtcctcagttcttagagaattggggagagggagcctttctcaggttattttaggggtcaagtaagcaagtgaggttgaggaagtgacccatgacccagagcccggaggttagggctgacccggccagttggggtttcctgtgtgatgttttatgggatcctctttgcagccccagggatagggtcagaggcccctgggtgtaactggcaggagtggacaacttggggctggcttagtagttcccagccacacccagactgaagggacactcaccgggggtggaggctgggggctgctgctccctgaagtcactctgatcgctggccctaggaaaggtcagggttatttgtgaaggtgcaaggttaaaagtcacaaattggagttaaaataggggaccaggaaaggagcctatttccaagaggggtatggagacctcctttctttatggagttctgtggtaggaggggcccaggtgaggggagttgaggaaaggccttacaaagccacatctgtcctggccagaggggaaggactctcaggcagatgctgggccaggagaacattgatccagtgacacaggaaagggactgaggacccagggaaggaatcagaccaccaggggttgcctgagaggaagggtcaaggcaccagggggaaagcagggccaggcacatgtgcaggacactgaggggactgcatgcatcttggattctcctggaactcagtgtccctgctgtgaccagacactccactcagggctggagatgctgaaatgggacaatgatcttgtcttctgtctctgccctttggcaagagacataaacgacattccaggatatgccatattggggccccggttctcccttctcacagctcagtgtctgcagttaccatgtcagtcaaaggggtgctgaccccacccagcccgtccaggctgttccagtctccactatgtgataatgcccaggatcccccctcagatgccctctcactgggtggatggattcagtgaacagggggaggtaccaggtattgagcaccgctcccccctgctccaggcagctgtggctttgctgtgctaggaaactaggaccatgctcaggggcatggccttaattggactgaattcactgaggacaaagctgttgaggaagcagcccagggtcagcagctggtgaggaaggtgccatggaatgagagggaaggatccctggggagtcgggaggctggggagagcctggcactgaatacaagacagggtctccttccttctcgcctggggtcagcgtgaaggatgggagcagaatggggaaaagctgtggtacctgccagtttttcggaggagcaggaaacacacaagtgcagccaccagaagactcccaaccaggaccccgatcaggatgcctagagtgttgtcatctgctgaaagaagaaggcaaaggggatgaggtccaaatctgttccagggggaaccatgaggggccttgcagggcaggggcatggtcagggaggaaggaaatgccatggagcctgagtgtggtctgttgtgctgtcctcatagctggctcccttgctctccgtggttgcaccattttctgtgtcttaggcttgaattactgggatgcatcaactcctacattctcccacaggaagcctgcacctcatcctgctcctgtgttttttagtccctccttcctctcacatcactcctcttccccctgtttctttttttccatcccatggcagtcgtaaagggcaggcccttgctgccaactcaatgctgatgagcagggatgatgttcattgactgttttcaggggccttccacatggaaggcacagtgggaatcaatctacctgcagcttttctcaccctcccattgccttgagggagaagggtatgtgatattgtgaaatacgtatttggtgttcatcaccattgatatggttaggctctgtatccccacccaaatctcaccttgaattgtaataatccccatgtgttatgggagggaccttgtgggaggtaattgaatcatgagggtgggttttttccatcctgttcttgtgatagtgaataagtctcaggagatcagatggtttcataaagggaagcttccctacacatgtcctcttgcctgctgccatgtaagacatgcctttcaccttccatcatgattgtgagacctctccagccatgtggaattgtgaatcaattaaacctctttcttcatacattaccaagtctcaggtatgtcttcattagcagtgtgagaatggactaatacagtaaattggtaccagctagtggagtgctgctataaagatacctgaaaatgtggaagtgactttggaactgggtaacaggcagaggttggaacagtttggagggctcagaagaagacacaggaaaaaagtttgaaacttcctagagacttgttgaatggttttgattaaaacgctgatagtgatatggacaataaagtccaagctgaggtggtctcagacagagatgaggaacttcttgggaactggaacaaaggtgactcttgttatactctagaaaagagattggtggtattttgcccctgccctagagatctgcagaactttgaacttgagggaaatgatttagggcaactggtggaaaaaaaattctaagcagcaaagtgttcaagatgtgacttgggtactgttaaaaacactcagttttatgtatttacaaaggtatggtttggaattggaacttatgtttaaaagggaagcagagcataaaagtttggaaaatttgcagcctgatgatgcaatagaaaagaaaaatccattttctgaggagaaattcaagccagctgcagaaatgtgcataaacaatgaagagcaaaatgttaatccccaagacaatggcaaaaatgtctccagggcatgtcagagaccttcctggaagccccttccatcacaggactggaggcctaggaggaaaaaatgtttcctgggccaggcccagggctcccctgctgtgtgcggcctagagacttggtgccctgcatcccagccactccagccatggctaaagagggccaaggtacagctggggccatggcttcagagggtgcaagccccaaaccttggcagcttccatgtggtgttgagcctgcaggtgcacagaagtcaaggattgaggtttgggaaccttcgcctagatttcagaggatgtatgaaaatgcttggatgtccaggtgaaagtttgctgcagaagcagagccctcatggagaacctctgctagggaagtgttgaagggaaatgtggggttggaaccccgacacagagtccctactggggcactgcctaatggagctgtgagaagaagaccacaatcctccagaccccagaatggtagatccactaacagcttgcaccatgcacctagaaaagctgcagacactcaacgccagcctatgaaagcagccaggagtggggctgtaccctgcaaagccacaggggtggagcccaaggctatgggagttcagctcttgcatcagtgtgacctggatgtgagacatggatacaaaggagatcatttcagagcattaagatttggctgccctgctggattttgggcttgcatggggcctgtagcccctttgttttggccagtttctcccatttggaatgggtgtatttacccagtgcctgtacacccattatatctaggaagtaactaagcttgcttttgattttacaggcttataggtggaagggacttgccttgtctcagatgaaactttggacttggacttttgggttaatgctggaatgagttaagactttggggaactgttggaaggcatgattagttttgaaatgtgaggacatgagatttgggaggggtcgggtggaatgacatggtttggctcttcttcacccaaatatcaccttgaattttaataatccccacgtgttgggggaaggacccagtgggaggtaactgaatcatgggggtggattcttcccatgctgttctcatgatagtgaataagtctcacaagatctgatggttttagaaaggggagttcctctacacatgccctcttgcctgccgccatgtaagacatgccttttgccttctgccatgatttcaaggcctccccagctatgtggaactgtaagtcaattaaacctcatttttaaaaaaattacccagtctcaggtatgtctttatcagcagccaagaccagctcggtcgcggagatcctaacccagcagtgctagaggaattaaagacacacatagaaatatagaggtgtgaagtgggaaatcagggttctcacaggcttcagagctgagagccccaaacagagatttacccacatatttaataacagcaaaccagtcattagcattgtttctatagatattaaattaactaaaagtatcccttatgggaaaccaagggatgggccgaattaaaggaataggttgggctagttaactgcaacaggaacacgcccttaagatgcagattgctcatgctattgtttgtggcttaagaacgcctttaagcggttttccaccctgggtgggacaggtattccttgccctcattcctgtaaacccataaccttccagcttgggcattagggccattatgaacatgttacagtgctgcagagattttgtttatgaccagttttggggccagtttatggccagattttggggggcttgctcccaacagactaatacacccattttctggtatgtgactctaaagtccttagaatcttcaaagtgatgtctttttcaagctaataattgactgatgactggcagcccctaggcaacttcagaatgaggctggtcactgacccaggtaggattagagggttgggactttcagcctcacccctaatccctggggagggacctggagtttgaattaatcaccaatgaccaatgaatcaattaatggccaatgattgaatcaattaatggccaatgattaaatcaatcatatctatgtcatgaaccccaaaaggactgggtttgaagagctgaacccatggaagtttctggagtgtggtgcatctggggagggcatggaagctccacaccccttcccacatgccatgctctgtgcatctcttcatctgcatcctttgtaaagtcctttattacaaaccggtaagcctaagtatgtgtttccctgagtcctgagagctgtttgagcaaactaatccaacccaaacagggagtcatggaaacctcaatgtgaagccagtcataagaagctctggaggcccagacttgtgactggtgggaaggtggtggcaattttgtgggactgagccctctgctgatatgtccaggtagatagtgtcaggatggaattggaggacacctagctgatgtacggtgcagaactgattggctgctgggtgtgtgggagaaacccccccgcatcacatttggtcacagaagtgtgtctgtgttgatgattgttattgtggagtgagagcagaggaaaaacacagtttgagtttttccaaacagggtggaatcccatctgccaatttagaatctgaaacttatagtttcagtacttcaattaagattgaagtacttcaattcagtacttcaattaagattcagtacttcaattaagattcagtacttcaattaagattacagaactggtaagtgaaagtgatacaacaaaaatgtaaccaaagtctgctcaacttaacagctaataacaacaaagttcataaaaataataccagtcgatattgatagcactgattgagccctggctctgtgcatgaccttgttaagggctttaatcgcattaatctctgaataaatatcctcacaaccaccctgagatccaggtgtttgtaacaattctacagatgaggaaactgaggcccaggaggttgagtgtcttgcccaaggtcaaatacctggtacctattgtaaccaggatgataactggatgagtctaatccctgagttcttacccacattgctccccaggctctgaaggaatctcatccttctcattccgtgtatcattttacaccccccctccctcctaggaaaatatacaaggaaaggagtgagaggggccgagggtcactcacattttacagtcagcttgagggggtcgctcctgttggagctgactgggttggagacctcacactgatactccccagcgtcctcctgcctgatggggtctatggtgagcatatggttaaaccaggacagcttcatcctcttcgtgacctgcagacgctggttgttgaaaatccactggaaagaggttccagtgttatttgtgtggcaggtcaggaccacggagcccttctctgtgactgtggtgctgctggcttggatggagggctgagccactgactctgtggatagagtgaccaacagaaagtgtcttggggccatgctgcatcctcagagatctcagagtcaaatttagaacattctcctgtgaataaaggagaaagatgaaggacagggaggagcagagagaaccagagacacccatagcagcgagcagtagggactacagtgacctcagagaccccagggaccaggaggacccagctgcctcagaccaggaccagggagccctgaaaaccctcccacagatgagcggccccagagtcacatgagatgcaatacctggggtggctttaggagcaggcagtcagagaaatggaacatgggtctcagcccctaagggacaaggaagaggtgtggccagctcctcctaggatcctacatccaggacccagtctgtaaagaggttatgattattcctttcttttttcattaattccctccctccttcatcagagaactactgagtgtgtgtctcagttgggccttgtgcaggtacagggtgtagtgggaagagaaagctgagtcctttccttcatcctcccatgggagtgacatcaacaaatcaagaaattcatgatttcacgtccagtgagggaagaaatgtggatctgatgggagaggcttggacaatcctggcattgagtctgatagttgagacaggtgatttcgttctaagtaaaaactgactaattctccatttgcccgtcattcctcagaccagaatctccctctctgagctgaggatgcccaagaagaaaggagctgaaccaacatctggtcctggggtccacagatgccccacggtggtggccacgaccagattctgggctgcagacacacggtggtgtgacgttgagcactgacagcctgtgtgatgctgatgcaatttctctttaataaaatggggtaaatgtcaatggtccctggcttgccatcctctctgtaaattaacattaaaatatttacaattacctgacctaaagcttggcacagaatagctccaaataaacatcatctattattattttactccaaaaaaaaaaaaaaaagagttctctgggcctgattcctggtggagaaggagcggtccagagtgtcttttctctgctttccctcctcctgaggacagtgcacttcccgggacatcttttaagtttcccatccagtttaatggcctgggaagtttgtttgtctgtcctctccactctgactctcaggtgaaagatgaggctctgcccttgcccagatggggctctgggggctgagccctgcctggtgaccagctctaggaaccacggccctgggacagctggtaaatcgttgctcacaatcagccctgcccaggaagccacaacccagccctggcacaggctccccagggtcatctggagtcaggatcttgggacaggggcctggggcaggggcttgaagggctgagcttctctcagaggatcctcaggccaggccctgactgagtcctataagatctttctcaggtcatgtctatgaggaggaggccaagcggggttggactgagactgattttcccccgctgcatctcccgcatcagactatccttcttgctgtagggaatttccacggagtccggataagggaaaggaattctgatctgttatagtttgtctcccctgggtgtgtcctgcactaaatgcccaaaccccaacatgggacgtaatgcagagggggatgcaggcacagcccaggcctgacaatcctgcgtatgtgaagcagaactgacccccaacacccagaggcacggaggaatcactcaccgtatacacggagatggtgagatgcctgttcaatctgagaatttctgtatgtgacttgtagggtgtagtatcccgtgtcctctagggtgacgttctggaaatgcagatctccactgggtgatattgtctctcgaccgctgtatgcaggccctggagtcctaacgtgagtgtctattacatatgctgcgattagctggttgggctccaccgttttccctttgtaccagccatagctgtaaagattctcgggcagataaaccacagagagatgaacattctccccttcagcaacttcaaagggcgctgatgcaataaagagccaggcagtggtgggtgcgttccagaaagttaaaagtgaggctaggaaagggagagaatatcagtcaatatttgacctatgcattggcatggaaagacggggtcctgggtgcaggtctcttcacccctcagccttagagggtgtgtgtgtgtgtgtgtgtcctactgggtcaaagtcagcagcatgaccctcattccttcagtacctctgaccttggcatttccttgtgtgaaccctctttcccaggggtctgcatggttccctccccactgccttcagttcctactcacacaagggaatccctgggagacttctttcgtgaagcctcctctagagaccctgggtcttccctttctgacctttcccagctctgttccctccagggctcttgtcagcacctgacctcacattctagatctctttgggtgtctgtcttcccccccatgagattgtgagctctgtgagggcatggacttgagtgatgttagttgcaccccagtgcctgggacaggctgcagactcctgtggatgagttcatgagcgttcccagggccttccatatcctggggtttatttgctaatgtctgaggttggcagatgaagacagagtttcatgccctggtggtgtttttatttaaattgtcactgtgatatagttttactatcattttcaaaatgtagtggccactgacaatgaacttgaaaacatggaccaactgagattgttttgccccttggcaattccagttcacttagattttttggttctccttagacgctctctcccctgagtctctaacaaaagccctctgtctcctctcagagccccatcctccccaggagaccccagccagtctctgtgctccctcctcccacccactcccagggagtcctcccctcacctgtgagcaagagcccctgccaggggatgcattctctgtggggacaagctgaggggggccccatggtctctgctgcctgctctgtcctcctctgtggagaggagcttgggctccaggaacgctctagacagggttactgtgactgttgtctctgctgtccttccttcctctatgctgagcttcctctcaggcaggagcacttcccgtttatgggcaagggcggggctctgcctacaatgtctctctgtcccctcccctctcagtcctgcctcccttgtccctcctttctccttcctttttgcctatatttggttccctaggcaaaactttgagaagcaacgctgatggggtcctcataacaggacgacccactctccccagtactgacctctgctgtgttctggccttggttctgtcacagccggtagattatttccctttgtgacacacaaaaccagctgggccctgggtctcctcatgctctccagtgctccaggaaggcagaatgatgcccagcaggaaagtgacagaggtggctctgggggctagaaaggggctcactgggtgatggctgggaaggacccacccgctatcttcagtgtcaccagcctggcctctgacccagggacagagacccaggcctggaggtctcgggaggatccccagctcctaggtgtggagggaggtgtcctgtgtgtcctgggaagagaggactttgatggaaggaggtgggaggctctgggttctgctgtccttggtgaaggtttcagggggaccctctccatgtctggggtctgtgcccccagcttaactctcattctctttgcaaatacatatattttgtggatctgcagttgcctgaactgtctcatgtccctaaatctttgtatccctttttacagaaggtcaggaagggtgtgtacatgagtatgaggactatctgatcagggcgagtgtttgtttcccaaagatctctttagatatggtataatacataagataaatgtactgaattagcaattttaagtgtagaattaaatgatactaattctattcacaatgttgtacaaccatcaccataattttttaccagaaaatcttcattataccaaatggaaacttcatacttttaatcaataactccccacttccccctgccccacccactggtagcctctgatactatcaatctctgtgaatttgcctagtttacatgtctcatataataaggaattatatacgtgtattatttttttctggattatttctcttagggtaacacttttaagattcatccacgtcgtagcatatattacagcttctttcctatttatggctgagtaatatcccaatatatgtttatacctcaattttaattcattcatctcttaatggacatgtgggtggtttccacatttttgctattgtgaaaaccgctgcaatgaacttacacttggaagtatctgtttgggtttctgtgttcatttctttgggggtacatataggagtataaatatggggtcatgtggtagttctatgtttaagtttttgagaaacagccaaactgttttccagtttgctgtgctattttatattcccatcagcaatatacgagggttccattttctctacattcttgtaaacacttactatttaatattttttaaaacttatagccattctagtaggtgtgaagtgatagctcattgcagttttgattttcatttccctggtggctgatgaagttgagcattttttcatgtatttactgacaattttaatattttttagagaactatttattcaaatcatttgctgtttaaaaaaaatgggttatctttttattattcagttgtaatagttctttatatattttagatacaagtcccttatggggtacatgatttgcaaaatttttctcatattctgtgtcttctcactttcttcatggtgttctttgaagcacaaacatttttaactttgatgaagttcacttatctatttttaattttgttacttatgctcttgatgtcatattgaagaaaccattgcccaatccaagatcattaagttttactcctatatgttcttctaatggtttgataagttttgctattccatttaggtttttgaaacattttgagttaacttttgtatgggctgtgaggtaggggtctaactacactatctcgcatgtggttatccagttgttccagcacaatatgaagaggctaccattctttccccattgaggaatcttggcacccatgtcaaaaaccaatgggctgtaatggtgagggtttatttctggactcttgattctattccattgatctctatgtgcattcttgtgccagaagcacactgttttaatgattgtagtgttttagtaagttttcaaattaggaagtgagtcctccaatttttttttccagattgttttggccattctggggtgacttttaaaaaagatgtagttcaatggttctcaaagcaggagtggttcagctctccttttttggcagtctggagacctttttaggaccttaatctaagtagataaattattcccactttcttttctgagttgctatgttacagtgtatattgacacccatgaaataattgagagaccctggaagtgcttgcctacatagtgagggacaattagttccatgatcatgggcacagaagattttgttttgggaaacaattttgttggtggagttatattcatgcttactcttttatttgtcttcatagcctgcatctccttcagacttcatatctgtttattttcttgtttgtcctctggggtttgggtgttgggtgaccagtcagctggagctggaggaggtgcttagcaaggcagtgaccctggttgggaggagcagggctcagcagggtgaaagtagctgggccttgagtcaggagtggcatctggaaggcctgactgtaagggtcagaagggccagcaggtgggtgtcctaggcacaaacggtggctgctgctgtggactggaggaaggtaagaggccccgagtattccatgttcttactggctccccaactgaggattcctctcctgggctggtgctgtcctgcagcagggaggggttagacagggacggctgcacatcaggccggagtccatgtcatcctcttaggcactgtcactacagattgaggattctgttcataagccaagcctttgcacaaggaagggacccgggctctcaaggaagagcagctcctggtcagacctccatctccttctctctcattgcctgaggcctcaagcttggtctacctggcacaggggtctggatcctcctcccagggttggggtcttactgagctgggcacctgcaggtgggagaagatctggaggggccccatctgccttcaccagattgatgttgagggtccctgagtcctgcaccactatcaggtgctgagcaacttccagtgtcagtgacaaccaccccatggtggaagcagaaccacctcgtgagaaagcacctccaagcctcagtgcttgccatgtgtgggaatttgctggtttcagttgggggcatgttggtgggtggtcatgaattcagggccggattctatgctcacagtgcacatgctggatgtggtacagaccccaggcagggctcagtggggtggttttgggtgtgcacaggtatcttttctggaggagctggtggtgatttggctcccagaagttcctgagctctgcagactcaccaagcactcaatatttgagtgaacattgggcgagagagcagaaggtaagtgtcagggcatcggggttggtgcctctgggaagaggaggaacattctgggaacaaagctctcccccggcttacagggagcttcccatcgctcctgccttgaggatcagggaaactagggcctctgctcttccaggggctgcttgcaggcagtttgctctgggagggggtgacccaggagttgcctctcattttgcatttgagatttaaaaggagaagggacagtatatcttgccaggtcacaaaaattacaggcatcatattgactgaagggcactcctgtcatcactgcaatataccagaatggtcttttaaaaaaataagtgatttaggtttaccagcaactgtaatgcttgttttattcttctagttcaccgttaatgtcacttttgtagttttagcactggcaatgttgattttatgttgactctgatgattttaagctttcatttgttcacatagagatcatcttctttctgaatattaatgcattttttctctatttctactggttattcctgtacatagagtagagaatcacttttcccaaggaggtggaaagcttctgactaccaaaaaaaaaaaaaagtgtcaaaatgctttaaagtcagtaacttaaagatcaaatccaagagtgggcaacagattctgcccagggtctgaaaggtggagaggtgactggtgaggatgtttaaaagacctctcctctctactccctaaatgggggccatccagtgttcttgaggttcagagaaggcccagggctggggcagcagggcactgtcagctcccagctcccaggggccaggagtaagaccccaacactgtccagacactgattgcattcattttgggggagagtagattcttatttaaagaataatacaaaagtctacaaatatgaacataaacagaaattcctttgctacaattttccccttaataagacattccttcctaatgacatatgtgactgcattcatggctgagatgttttctaggatggtgagagcatcagagtggactatctggtgccttggggtcatgcattttcttcttccaatgtctacaggatcccccatgtcccactttgtagtgtaactcagtgtgtgtcattctggtttttgttgtatagatccttggaaagcccatgtcattcctgctgtgaggtacaggcagccaaatggcatcatctctaaacatgccttctcctggtacatcaaattatggaataaatgaaagccattttgacagatattgaagatataagtttctactcttcccacacatgcttctcccaagtgaaggattttactggtgaattgttattagagattagtgtggatcagtgactctgccaggggaaattttgccctctaggggacatttggcaaagtctggaaacattgttggttgtcagagctgggggagggagtcctgctggcattgagtgggtggatggtgctgaacaccctgcagttcacagagccccaccagtttgaccacccaaatgtcaatgctgaggagtggagagccctgctgtgccctcccgcagcttccctgaagcttcccctcacctgctcctcccatgtctccccaccacttccccacttcacccgcctccttacacctcagtcccctccacctgaactcaccccttagtccaaggccagccctgatctccgctctcctggtctccttgctccttagcaggaggcgcccactagatggcgcccttgcccttactggagctcaccgtctccctttccaccctgagacaaatgtggctgcttttactgccacaaccccagccctccacactctagatttgctcagggagcagctcctggacagacctcagggaccccagggaggagcctcactctggagattttgatggcatggtctttgaacttcactgttacccccagtcaggatccaggatgttgggagtgcatgattctgcccggtcccacttcagcaggaccccactgctgagttgtctgtggggacccgggcctctcatctccttcttgcattgcaggagagggatcttagcactgctttcacataaagtcagataatggaggagtgcaggtgagtttgggaaggtggacatgaagagaggttgtgtccctagaggtggcagcagtgagaggatgggcaggtgggaggaacacagcccatccagggttgccagccatattaggagcgacagcctttcctctaagcctccagcctttttcctgaaacattccagaactttccacttcagcacttcccactgaggctcctcaggtctgtccctgagctcccagctgagcctacctacccatctgaaatcctgagtcctgtgtcaccctcgttccccattattctgtgcagttctgtgggacgcccagctctcctgacacccccagtcttcagaatggccatcagcgctgtcgctgtggcaccagggtgactgccgcctggaggctgagtcctggcttcctgacagctgtggggcccgctctaggctcccttgtcctgatcattcatcacctccaggatgcacagcagctgggccagggggaggagcagggacaggtgtcagccaccctgtgtgtctgcaagtcaggctgggggtgtgggaggacgccaggaatgactgaactttctgatttagagggtgagagcttgcactgatggaatttgggatttaataggaaaagcatagcgttttcctattttgtaggcagggtggctggagtttggaatcatagattcccctgggatgtcactgtggacctcagtcccacccgttaggggcacagatttcagaatccacaccctggggcaaagcaggcatgggaggctccatcagcctggccagggctctctatttgtgcagctgctgcaaggagatgtgcactctgatgggaacagtgctccctcctccttggggggcagtatctagctccctgcagcccctctccctgcaggccctgccctctctgaacctcaccttccccaacccgccccccgcaatcccatctcagctgtaatcccaacactttctcatccattatgggtggactgcttgagcccaggggttcaagactatgctggctggacaatatagcgagttgttgtctctacaaaaagacaaaaattagctgtgcatggtggcatacacctgtagtcccagtcactcaggaggctgaggtgggaggattgcttgagctggggaggctgagttggcagtgagttgagattgtgccactgtatacttcagtgtaggtaacagagcgagaccctgtctcaaaaaataaaagtaaaaaaaaaaaaagaaatatggaatacattattgttaactctaatcaaccatgctatgcaatagtccaccagtaataccagtaatagccaataatgaattatctgaaaaagaatacaatttattcttagctatctactgctaaaatttttaagctatcttttatgatagctgaaacaaaagaagtaaatttaaccaaggaagtaaaagacctttataatgaaaactgtaaaacattgatgaaataaattgaaaaagacacacgcacaaatagaagatattccatgttcatgaattggaagaactgatattgctaaaatgtccttaccacccaaagtggtctacagattcaatgcaatttctgtcaaaacaccaatgatattcttcgaagaagtagaagatcctaaaattagaaaccacaaaaattcctaaaacctgcacaaaacaccctgagttgccaaagcaatcttaaacaaatagaacaaagctagtggcattacacttcctgacaatcaaagcatactgcaaagctatagtaaccaaatcagcatggtcctggcataaaaacaagcacatagatcaatgaaacagaataaaaatcccagaaataaacccatgcatctctagctaactgattttcagccaaggagccacatgcacacaatggggaaaggacagcctcttcaataagtggtgctggggaattggatattcatatgcagaagaatgaacctagaccctatccctcaccatgcacaaaaaattaactcaaaatgtattaaataaagacttaaatgtaagaactgaaactatgaaactactagaagaaaatatagggggaaaatccatgacattggtctaggcaaagagtttttggataaaatctcaacagcataagcaacaaaaccaaatataaacaaacgggatttcatcaaactaaaaagcttttatacagcaaagaaaaaaaaggccagcagagcaaagagacaacctacaaatgggaggagaatatatttgtaaatatatacatatatatttgtaaatatatacatctgataagaagataatatccaaaatatataagaaaattatgtttctgtatagttttatctgactgggatacagaggccacatccacagtcccatcctcaaaggccacttgttcccaaaatgtcaagcacatccctcaatgatccatcatcaacacctatgtctgtaggatgaagggtgaatcatgaagcactaaaaaggaagaaggaagccaatcccaaaacaaaatgatgcagggtctggaaagtccaaagcattttttttttttttttactgcatcttcctcctttcttctccacattcccaatcctcactattgattaacaaaacaaaaaaaactgggacccaccatcttccctactgtcaggagatctagcgagattgtttgagtcttagaccaaactttgccataagccaaatttctggctgactttacaatgatatgagctagcacagtctctttttctgccagtcaacttgtgctcggttttatttgcaaccaaatagaggtggtaaccaaatataggtgaccctaaaattagtcatcaggatgaaatcctaaaatgtgcaacaaactgggttgaattcaggattagtagcaacatctctgttgtgggcttgaaaagggggcacccttttatgcagtagcaaaattgctaaattgttgtttgctgagtctttggactctcatcccggattttctatgaccattcaaacagggctgcaatgaacatctatggttgtttagcttggcacacttctacatttctatatagtaatatctagaagtgcatttgctcaatcacaagatatgcacattttataattgactgctatcgaactaccttaaatagccttaatttgttctcaacattgtttaacagggtctgtttaatgtcctacgtccagcaaggacagtatcacttttcttaatatttttcaaattattggaccttaacaaatacttaatgtgcaattaattgattcctttgtattcccatgccttcttttatatgtttccttatagtacacaaaaccacattattgtttctttacttgtgtcattccaccctggaccattcctatctaaactataacattatgagagagagagagagagaaaacaatatgaaaatataaattgattaatcaaaaaaatttaaataggacaaatcaggaagacacaagagagattttaaaattattcagagaataccacaatagctgtaccaatatattttaaaacttagatgaaacggacaactatctcgataaatgtaaattaccaaaactgactcatgaaaaaatggatattatgaatagagcaataatcagtaaagcaattaaaaagacagttgataatttttatttactgacaacaataacaaaatttcaggtcctgatatttttatggtgaattttaacaaattttcaagctcctcctcaaccaattctcagaaggtttaaaactttaacaagaaaacactttctaacacattttcagaagctgttatagcatgataccaaaaccacacaagaaaattatagaccaatctcacttacaaatatacatgcaaaatcaaacaaaatcttagtgaaccaaattcagaattaataatagcaaacaagcaaaatatgttatcatacgtatggcttatatcaggaatgcaagtatgtttcaacatcagaaaatacttctccacattaacagactaaaggagaaaaacgcttgtttaattatctcaataggtttttagagaattttgaaaattttataaagttatgcgtattctgtaaaattgatgaaatccaaccttgatttatttttaaaaattgcctttcctatagaattataggtaaaggaaacacatgcatcctcacagagctacttcaaggctaagttacttcccataagtaacgtatcctgtaatgtgtgcttggcacatattcaatactaaacaaatatttgcaaatcctcaaaccacttctcgctcaaataacccacctttgtcttttgcctttatgttagggttgattttctcaattgtatcttggagatcctttggtgggtctttcagcaattaccctgaatttgcttttctgtttacaattttaattcctgggaactctttcttgttctctgactgcacccttttcatgagagttcagccatcaatcctccagaaccccaccccccccgcccccccaaaaagcaataaagatgtctaaaagcttccttctgggctttcgaatgatgtttaccccaggcatttgttctattcgttcatcacccattttccctacaacttgcctacacttgatatcagatttttatttattagtcacctatcttcttcattggcccattttcctattttgccactggttgttctcaaatgtgttatgattcctggttgtacagtcaagtggttgataatcttggatatacgataaagatttgctctgtagctgtgtgtaagcctatataaaagcttttgtatttttcttcttaaaaaagacaaaagatggttgggaagatccctccagttcaccagttcgaggctgcagtgagctatgatagcgccgctgctctagcctgtctgtctgtgaaaaacaaggggggcggggggcgggggggaagactggagatgtaaatctcccgcagggccctacccgtatccgcaacaggtctctaacaggaacagcctcaggcctgtgttggaacaaggtaggttacagaaatctggaagccagatctgtaacttcagggtaaggactggctctcagggctgatcccccgggctgggtgtcccagaggcacccgcccccgccccttccccaaggcaggccaggacaccttcactcctctccttaggctccccacccccttctcctccccactgtgcctcctggagtagcggtggcggtgccacaggggagcggggcggggcgggctctgagggcaagggggatgggccccgccggggtcactggcggccaccctggaaactcgacgcaggccggcccttctagtgaatcgtcccagccacagctggcctcccagccgcgcttggggcgcctcggggcgcgaatggtgcaggttggggagactcaccacgcaccgtcgggggtcggtccggttattcctcaccgctcggctccagtgggcgcgcgggcctctcctcctcagttcctgcgctgcagtccctccctcacccttcgcagcttgggaatccaactgtgtcattccgacggagcgccgtgaggacctccgagggtgttagcgccaagtgatctctgtccagcgctctgaatatccaagtaaaggagttcaatgaagggcgggtcaacggaggagaaaccgtgactctctcaagggagcccaaggcctccttgtctaattagtgacgcgccaatggatggaggctcttcccaccatctcttcccagcatccagtgacaccaccgccaagggacgggctcggcggaacctgcaggaaagaagcatcggctgagcctgactgcagcgctgtgaagagacaggggaggggatcagtagttggtcccgcgcccaccccctgtttccgcgaggggcggagttgactggccatgcaggcagagggcgaaatgtgaaattccactactcctaccgtttttccctgacccgatggggcggagtgtcgtcaggctaagttccctggcggtaaggtggggagattgaggcgcacacctgccgaacggtaacgcaggattagctaaggcgagctcaggacagaagcctcccgaggagcaggagggcaaaataataaataaataaataaataataaataactcactccttggtctttatttgcggcaggaattcagaaggtgaaagcggggccttaggatctttctgaccttttgggttttaagcaggaggtgtcagaaatgttaccacagggctagctggcttgtggccagcaagcgttcacaatgccctcgatttttcatccctctctgtgggttctttttttcattgtaaggcagaatttctacgattgctcacccactcagagaacctgagctggtttagaccaggtgagacaggctaggtttaccctggtgatgatgtgttgttgccatggcgatcctgcccagtaccagaggccctgcagattcagatgcttggtgcctgtgcttggctgaggggccaatgggtgaagctgccatctgcgggatgatgactgaagcctctaagtcagaatccgcccaggctgagccttagggcagctccatggagcctcggctggcctgggatagagagtccaccactgtgccagcccccagccactgcctaggtcctgtgctgagagccccttgtccagggaaatggcgtccagtggaaaagggaccacccccttgcccttcactcaaggcaggttggtgacaaccctgaagctaatccgttcctagaggagctgcttctgggtccgagttttctctgcagcagagcagctccctggatgggatctgttcaaagtccgcctttcacgcggaattttccgtccttgcaattttccacctccaccactaggggatcctctctgaccgcctcatgccggctctggcctctgagcaggggtttctcttctgcatgtgcgaccttgcgcatgcctagtggccttttgggacctagagctgctccacaccccgatggggttacagagtgcctcgcctccactccaccccaccagggttccttccctggctgggatgggatttcagaagcgccgaggaacagcccagacaggtgtgggagagtagccaaggcccctgtcccggggtggccaggacagcggtggcctcgcataggacctggctgggctgctgcaatcagtgtcctgccccttggagagcaacagtgaaaacaacaagactatcttcacccaccttaagaaagaacagaaccagtatccccaactctgctgtgtatcccaacccaattccattccccaccccactctcagtagccaatatgcaaaatattagaatactcttactgttattattttcaaccacactctgcatcctgaaaaaccatatatttcgttatgtgcttttaaacttcttgaaaatgaaatactgaggctgggcgcagtggctgacacctgtaatcccagcacttcgggaggcggaggcaggcggatcacgaggtcaggagatcgagaccatcctggctaacacagtgaaaccccatctctactaaaaatacaaaaaattagccgggcgtggtggcgggcgcctgtagtcccagctacttgggaggctgaggcaggagaacggcgtgaacccgggaggtggagcttgcactgagccgagatcgcgccactgcactccagcctgggcgacagcgccagactctgtctccaaaaaaaaaaagaaaaaagaaatactgaattttcaaatacttgctttttttttcggtcaaaattatgttctcaaatttcactcctgtagatgtgcgtggctggctgtagtttttgcatttttattattaggtattctcctgttgcattaatatgccacattttatttctctcatgtttttggtgaccacttggggtgttttttggttttgtatttttgctgtatacatgctgccatggtggacatacctctttatacatatttcctgttgtatgcagacacaattttaggatgtgacatcttcagcttttctattgtgtcgtgtgtcttttccttcgtgctttgtgttatttacatattctggacacagattctttgtcaactgtatgtgctgcacatctctttcccagtttgtgtcttcttcttcttttttttttcttaaaaaaaactttctttatagtgttttttttttctttctttctttgttttgttttgtttttttgagatggagtcttgctctgtcacctaggctgaagtgcactggccgatctcggctcactgcaacctccgtctcctgggttcaagtgattctcctgcctcagcttcccaagtagctgggattacaggtgcctgtcaccacacccagctaatttttgtatttttagtacagatggggtttcaccatgtttgtcaggctggtctcgaactcctgacctcaggtgatccaccctctttggcctcccaaagtgttgggattacaggcgtgagccacagcacctggcctgtgttctttcttaagtagatgttacttttaatataatagaatgtatcatattttgcttttatattagtactttttctatctaattcaaacacatccccaagggtctttgtgtgtagactgaccaatttctcaagaatcatgaatgaatactgcttctctttccccaatttatctgtaatgctacctttattataaagtttctatgcatgtgtagaaatagttcctgatttttcactctgtgccaccagcataccaatagcacgctgtcttaaatattaaatagcagagctttatgagacaacttgatgtgcagtaggcaattgcccccttgttactcttcttcagggttctttgttgtaccacatgaattttagaattggcttgtccagctaaaagacaactgcaaggattttatttggaagttcataattctatacataatttggggaaagtattttcataataccaagtcttcctattaatgaacacagactctctctctctctcccccacccccacctgtttagttatttatatctttatggtctgttagttattgtttattgtctttcaaccaggtttcatgtttttctacatagaggccttgcatgtgaaagtctttcttcctagcttgctattacaaattttttttaattgcactttttgggtacagtggcttgtactgtaatccccgatacctgggaggctgaggcagatggattgcttgagtccagaagttcaagaccagcctgggcaacataatgaggtccctgtctcaaaaagtttgttttaaaaattgcatttgctgttattcaacaaatgtcattgtgtctcatatatggatttttatatctgataaccttgttcaacaatcttttgattctaacaatatatcagattcttttgagttttccatatagacaataatgtcatctgtaaattataattgtttcttctttgttatttcttggaccttttattttatatttttgtcttgctgcaaggcaatatccctctatatattgtggggtcttttttctcataaagtggggatggtgaacacccttgtcttgctctctgattgtataaagcatgctttctgtagcattttgtagacgctcttttttagattgaggtaattcacttttatttctggtttactgagtttttagcataaattcaggctgaatttgagctaaagctttttctggagacatcatttgaaaaattcatatgatttactttctttaagtcaccaaagttatgatttacattgaactgagtttctactgtttaactgtattcttgggagaaaacccacttgtcactgaacaatatctgttttatttactgctgtcttgtgtctaaattttcttttaggattttttgtatatgctcagattagcctgttattctcctttctgtatttttttctggtttgggggtcaaagttataatagcctcacaataagagctaagaaaccagccctaatggaggccggggcaggaggtttggagttcaagaccagtctgggcaaaatagtgagacccccatctctatgaaaaatagaaattagccaggcatggcagtgagtacctgtagtcctaggtacttgggagggtgaggcaggaggattgcttgagcctaggaatttgaggctgcagcgaactatgattgtgccactgtactccagcctggatgacagagcgagaccctgtctcaaaagaaaaaaaaagaagaaataaaaaggaaaagataaaagagctaagcatctgtttccttttttccattttctgggagagtatgtgtaagactgtaattaactgtttcttgaataatgggagaactctgtaaaataatctggctttggtgttacctgtattggaaggatgaaaaataccaattcagtttcattattggttgatagggctactcatgctttttgttttgttttgttttgttttgtttttgagaggaagtctctctgtattgccctgttgtccaggctgagatgcaacgttgttcacaggcctgatcctggctcactacagcttctaacttccgatctcaatagatcctcccgcctcagccttcccagtagctaggactacaagcatgcagcatcacatccagcctcttttcctgcctgacccagttctggtttcctttagttttctaggtgttcatccattttatctaatgtttaatgcatttggcataagggtgctcagtgtcctttcattgtctgttgtctgtaactgttgccattttcattcctatttatgagtactggcgtcttctctcactttttcttaataatcctgctggaactttgctttttaaagaacatcttttgacttgttgattcttttttcatacatattaactattttcttattttttgcctttatatttatttcttttcctgtttgaaacattgctcttttcttactataaaaatgggtaagtagctcatgaattaccacctcttttaaaaatcttttctactgtaagcattttagcagtttacatttgcccacaagtaccacttcagctacaccctatgtgcttttacataaagtcttcatttttggtaagacatattctcaaattttaattatcacttgtttttaaatccatgatgttttatttgaaatgttgtttctaaagatacattttctggttatacttttattcttctaatttagcacagtggccacaaaacatggtctgtgcagtgcatacaatcgatgagtaatttctgagctgtagtatttggcataatatatggcaaaatttcctaagttttccatgtgtgctttaaaaaacttccagtaaaatacataaatctgttagatcaagcttctcacattgttcaaatagtctatatgtttactgattcatttgactgcttgatttatcaattacaggtaggaatgtattcaaatctcctattaaagtgtgacactcaagtggctttttaaagacagagatgccaaaccaatgaatacatgattttccccaaagcctgcacaaattctctaatgaaattttaccatgaaagtttgtttaattaaggcttactaaagcagtatgttgtcttttactttttaaacagagaatatatattttaatacatcgtttaagtttatgattaattatctattactgaggataagaatctttgcctgtgctcattcagcatttgcacttcatttatgatctgccttctcatagcttctgttaatttttatactagagacatttatttgtttgtataaatgttgaaggtttttttttgttgttgttgtttttgagtcagagcctcgctctgtcacccaggctggagtgcagtggcatgatctcggctcactgcagcctccatctcctgggttaaagtgattctcctgcctcagcctccagagtagctgggactacaggcatgtgccaccaagcaaggctaatattttgtatttttagtagagatggggtttcgtcctgttagccagggtggtctcgatctcctgacctcatgatctacctgcctcggcctcccaaagtgctaggattacaggtgtgagccaccgtgcccagctgggttttttatattataaggagatgtaatagatagatagatgtttcaaagatagtcaaatgtttttaaaatttaaaacacttttttacaggttgactttcaccatttaatttcatctatgtgttttgccttagagaaattttaaatgctatgtagatctcatgacttataattatgaagcattttgttttctgttttccacgaaacttagcttaactttgagcatataatagttgtaaaggtaggagagtaacactgaaaaaaggaattgcataaaaatggcacattttctgtagagttgtttatcgcctgaaaataggccccatttcatggaagtaagatgatcaggctcaggtccccagacgaaactcttggcatggtttttggagatagtccagggctcagtactggctctatcatttgctacttctcccaaagtaaccaatatctcatccaccctgagcccatttccatatctctaacatgaggataatagcatctaccttacacaccaagtagagggatcaaatgtaggaactaaatcaaagtaccagcactgaataacctacatcctcccacttcccaaaaggaagagagatgtatcccctgttgacaaacgagaccattttgcaggagagaaaggaaatgccagttcacttgcaatgtaaacatgctctctctttttagggatgtccagggacctgagagagaacccatgcttaccaaagagtttctagttccagacacacaggactcgaagggtgacaagtatggttttcagggtccctgaatccacccagtcctcacagaaactcctaaaagctgtcgattgacagcgttgagttcacagctctggtcctcacatgctgatactgcttgtgatatcgaacccgacaggaccccacatcacaattgatttaccaactacaatataatacctcctgaatctccaaattggctcacccaggaacaaaggcttggggtaaaactggattaggagatataagctctgaattttctgagggtgagacacacaaggattctaagtgacacgccacagagtaacgggtctgtgactggaggacccacagatttgtcttactggagacaccacatgcacacaaactccatccttagctgtggaaacaagggtcttttgctatcttagccgaattctgggagtaatttttggaggggaggagatctttgggattgcctctttcaggccctttacaaaaatacctacttcttaaatggtaaagcttacactaaactgaaaaaattacatccttggctttttatgaagtaggtgttggattgaatcactactggaagaagtatggcatcgcaaattctaagcagtggtcaaaggatggatctgttaaattagaaaaatctctaaatttataaaaagattttagattcctttattctaaacaattgacctatttgtactcatgggacaatcaaatttcaaaggagatatgtaacgatttcatggcttgcattaaaaatccttctgataaaattaaagataaaaaatctgaccccctgccaaaaaaatcttttgaagttcatactgcctgctttcaatattctgtgggattcacaatgaaaggtgccttatattgtggcctagcttcaagtttatgccttcgccaccatggcctgggttcaattcccagtcagggccccagcgcctttggtttaatgtttgcgtggcatttgacttttttacctatttagtattggtgagattacctttggtaaaaaaaagtttaaagagtggaaatcgcaattctttgtgttggctaaaatctgattataagagatctggaaggttttatttttctttttcaaagagctctatggtcagaagtcggcttcatgaaaagctaatatttaattatatgtacatacagtctttctggattttctcttttgcctcctgttttgaaaaatatttggatttgagtgaaactccgttttagaaattaattgcttggtacaatatacccatgtaactaccctgcacatgtaccccctgaatctataataagagttgaaattttgacaaaataaaattagattttgaattaaaacaaataggtgcttggttcctctgctcacttctttttaaaaggaattcctctcccatgtacttcttcttttcccttctttaccttccttttggcatctttggtatcacatgaagggatctagagggaattttaagtgactctgaaattccttgagaaatacacaaaaagatcccactcaccccttttgggggtctcctgttctccttgtggagtccagagtcagggacaggctcctccaggtctgcagctctgctctcttttatttcatcttggctgattgctttggttttgtgagtaccaggcattactttgtactgtgagagacacgtcctttgtgagtgcaacggctgctgggtcactggtgagggctgcagtttggagatggctgagagccgttgcaataaatggttgtgattgcagggggctccttgtttctttgcaagtttagatgagaaaggtgcagtttggacacagtttaaaggctgtgaaaacaccaccaatgaatatgatttcctttggggatggtctgattaaaagtgggctgattgttgctgtgctactagccttgaagacatgtttctacagcattgtgcagtgtggaaaaattgtgtggcttggtcttgtggcatgtcccttcttttagagacctcagattcaatgtgaaattcgggatttttgattttcaaagatctagatgccctgccttccagatgtgcctactcttcacatattttaaaattagatcctataaactgcaaatactttgttggcttctgtgagatcagaggtccagttagaaaaggaagacagtttgttaaaattaaaaactatttatctaatctaactagattggcctccaaatatgactttctgacattcagctggttactctgaaaagatttctaaatctcttgaggctcatctatatgtttccttgcaaagaaaaaaaaaaaaaaaaaaaagcaagcccaagcactagtaagaaaaagatttgcaatgtttcatgaaaggagtagatgagtgaagcatttatttgtagatactgggttggatacctgtgcaaagaagaagaggtcaataataaaaattgccaggggatttcttggaacttaacaagctgaattaaatatagaaatgtcaggaaatcaaggcaggaaatactcacttgtggttaggcagacagggcagggttctgagcttgagatggagcaaacagttgtggtgggtgaagttcacatgctttagagctcagctgtcctagtaaagaagcctaagagtctctaaagctcttatgagaagatggattttttttgcctagattaaaaggttaaagaattgctttaagttggataaaataaagctaaatgtttaagcaagttgtgaaaggtttatgaaaaaattaattaaaatatttttgtgtgtaaacatattgactaaagttgaaggggtataattcagcatttctgtaaattgagcattgaaataaaaacacaatgggtttctcttagagcactaacctgctctttaacaaaaattgtaaagggttatagaaagtctataaaaatgttaccttatggtcaaacattaaaattgggtaaatatgtctatcaggttttattaagaattaggtttaacattaatagtacactaatgtaaaggtgaaatttggcttatttggtacaaaaatcatacaggaagcattgtgaaatataaaatgatttttagctttctttgggctatatttctataaatatgttattgatgagggttccaaagttatgggagactcctataattctgctatatctcagtgtacattatcagtcataattataattgtcatgttaaattattgtgggccacagaggtaacagatttccttgtcaattgtgtctttgactatgactaccctaaaacgttcagtcacccatatacacatgttaccttgttttggccctctttagaaggtaattttataatcagctataaagccctaacaggtgctcttaaatgcaaattttgataactttggagattgtgacatcagaagagaggaaaaatgttcgggacacttggagagctaaaatgttcattgatatcaagcaggacaggaattaactgcatgaagtgaactaataggaggctgaagtgatctttttgactttttgcttaaaacgttgctgatcctttgttttgcttttcagagtcaaggcaaattttcttttgagctattgacagcttttaacgattaatcaaaatatactcctatgaacaccatttggagcattatttgtttctctctacccgatttccccagaatttggaaactatttgtgggtattcttaatttatggcaatatagttatttgcataagtgcaataagaatgtgttttctttggtaacaggacacaatttgaaaaactggttattttaccaaggttttgaccagaatgctgtgctttcctttaaggaatcaaacttgacttgtggagctaataaagcctttggaaaactgaccttatatcctgtgaacacagtccctgtacagggttactgatctgtgggaagaaaagaatgtcacattctgacaggtcaggaatcccaagttatcttgaaacttcaagaggacaggaattcacccaaccatatgtatttgatggtagaaatccatggcaggggctcagctttaaaaagtcttatctcagattccttctataaaacaaagtcccattaaaaccaattttaaaagcctatgtgaaaaataattattcttgctgcacctcgtacaaataaagtggcaaagcataataaagcaaattggtcctgtcgtaatttgtctttagtaaaaacgggaaactggggtcgggtgcagtggctcactcctgtaatcccagcactttgggaggctgaggtgggcagatcatctgaggtcaggagttcaagaccagcctggccaacatggtgaaaccccatctctacaaaaatacaaaaatgagccgggcatgatggcgggtgcctgtaatcccagctactcaaggggctgaggcagggaagcggaggttacagtgagtcaagatcgtgccacttcacgacagcctgggtgacagagcaagactccatctcaacaacaacaacaaaaaagggtaactggagagagggaagttatgtttcaaaaacttttggaaactatagtacacctgtttttaaattctagtctggcattcagtttttattattttctacagtttgggttaaattcgtatttctctggctacaagtctcctaaataatcttttcatttgtttcctttttctttccctttttccccatttttcttaattggaaatcactgaaacctaagctgtgctttcttaaagccctgtgaactgaagactagacaaccgaaacttctgaaggaagtagcagcaacctatttatatgtgttgctgttgcctactattatgttttagcaggtgctgcctctacacccccgaaacagagagtgctactgggaacaaatcgactttttccactccagtgctgcattcggtgccccataacgatgaccccctctcagcaggaagtagccagaaagattacaatgctccatctccctatgattcttgtgataaataaatatacaagcatgatagaaatcatgcgcaaattgacagtggggattgtggcaggccagatttcactaatggaggtccccatcacaactacttcagtactgactgagtggttaagttcagtatcaaaagctgaaagtgccagcgcctttctacaaaggctagaatgtaacaaaagcccaccaagggttttacctaggcctttcctgggccttacagcatgacaaaacaaagaaggaattcttaaccagacctgtttaggattaaacaaatttaattgggggtctgaagaaactcgccaggcctccacaaacaagttcattgggggtctaaaggaaccccccccaaacctctgtgattgagcaggagacaaggtcagggtaattgccccagcacctggactcatttagatttaagtaaatgtactgaggctccagagaaaggtctccaagacttagactagagttacagattaaaagaagttaatcacttatatctttagataaatgcacactgacacgtagacatacatcttagaaaatatataagctctggaaaaccttgtaatttacagttggtctggagatattttctgggccttctctctgtaaccggttccagaaataaaaaactctcttcctccccagtttatctgcatctcgttattgggccgtgagaaatagcagccagaccctgagtttggtctgggaacacactggctgggcttcctgcctggcggtagagcttcactgtcctccttcccagccaaaatgtggcccttgaaggcttcctccccaactgaccggttttgggttctaggtactcagggaacaccgtcttcaaggaggccattttcatactgttcctggtttgatttttctgaaattaggaaatgccccttgaggcatccaggattgtctttatttcccctgaagcttcccctcctgaagaaaaaagttctcaaacaccctcaggactcaaaccccaagttcaccctgtgaaacattcccatttcctaaacccaggcaggctcatggccctcagcctctcagaccccatggaaacctcctcccccacttcacgggttctctccatattgagagcctcccctcctcggcacacaacccagagactcaccccaacatgtgtagcaaatcaccctggaaacaatcatggctgaacgtggtagcccatgcctgtaatcccagcactttgggaggcccaggaggtggatcacctgaggtcgggagttcgagaccagcgaggccaacatggtgaaacctcgactctactaaaaatacaaagttcactgggcattgtggtgtgtacctgtaatctcaactactcaggaggctgaggcaggagaatcacttaaacctgggagacagagattgcagagagccaagatcgcaccattacactccagcctgggcaagaagagtgaaactacatctaaaaaaaaaaaaaaaaaaaggaaaaggaaaagaaaaaaaaaatcatgaggcaacattgcatttaacaatattttatttatcaaaagacacttgtctttctcaggtaagtgaaggtctagagatgaaacgagtcccgatgtaaattgccccatgggcattgctgagatcacaagatcatcactgcagcatgcagcacaatagtaaatttctcaggatggaagttcaacaatccaaaaggtagtattttttttcatgatgctcagtccatcatacgaaataaaaataaattccttttcatgatcatccattcagtagaaaaaatgatagtaaatttgttctcatgaagatttttaccgtaacatataggatttatcgttattattattattctttgttttttgtttttttgaagcggagtctcactctgttacccagtctggagtgcagtcgtgcgatctgggcacactattaacctccacctccagggttcaagcatttctcctgcctcagcttcccgagtagctgggattacaggcatgcgccaccacacccggctaattttcgtatttttactagagatggggtttcaccgcattggtcgagctggatttgagctccggacctcgggtcatccgcccatctcagcctcccaaagtgctgggattacaggcgtgagccaccgcgcccggcctcaatttatcattattcacgcatccacaaactgggttcttatattttgtacgtgattttttccattgaggagagatatctgtgcatattcatgctgctcatatttcatccacaaactcggttcatatttcatccacaaacataattttttccgttgagaagagatacttgtacatatttatgctgttcaaattcacatttcatcattcttttacaagaaatagataatgtattttaaggttttccagtggtattacagatattttactgggtgtatagatagaaattaaaccaaacttctttgttctggccgccagtcatgcatcctgttttcaacatagttcacatacaactggttgtgtaaaaatgaaattattttgtttagtacaatcatcaacagttggttgattagatttttaattatcaagttaatcattgtcattatgcttctcatcgcactcgtcattaattgctgtgggaggaaatttgttatgttccctatgagagggtgtatcacaaattcaaataagaattcaacgacaatggactgtataaaggaaataagcaagtccatggaaaacatatttttttccggaaaggattaaaatatttttaaaaaggaattaaaaaaaaattgggcacggtggcaaatgcctagagtcccagctgctcaggagatggagacagaaggattgcttgagcccaggaataagttggaggctgtagtgaacagtgattccaccactgtactccagccagggcaatagagggaaaccctctttctaaaaagacaaaaagaaacaaaacaaaacaaaaaaacaccacatcaaaaaacccaacaacaaaatgaaaaaccaaataacagcaatacaattggagctattcgatccaaagaagtaaatgaaacataaagcaaataaaagagaaaagctaatacctgtgtcctgcaggactcagtccaagttctgctctgactccctcctggtgagccaccccttaaaaagtcacttggggcggggttactttgacagacagtcttctgtcaaagagggaggcggtaaatagcacttttttttttttaatttaacgcctttccaacaaattagcggctatgttgtctaagagtgcaaatgtcagaggtgggtacaggcagcaagaccctccccacaggggcagcagaaggaggaatgactaagggaacaagactttagtgtgctcaactacacaggacaggaaacagatgctttttacaaaagctggtggacttgaaggcagaatattttcaagttcctgtaactgcgaactatgacctgtagcctgtgagagtgactttctgtggcaaaggagcttttgtgaatgtgaggaagttaattatcttaacagtgggaggttctcccggcttatctagctagaccctcgtgaaatcccaagtgtccttaggaaggggaagcagagagagatttgagtccagaagaggaagaaggtgatgtgaggcccagtaggggaacaaagggcgatggcatgtaaacacttagcccccagaagtgggagagggctggggttcatcacaccagaatccctaacaatcagccttattttaattacccttgaaatggaaggaggccttagagagccagaggcttggaggggcaccctctgctgcatacacagatcccaactgctgtgggctccaaataattgcaccagggaaatcacaaattatcaaaaataaaggatgtaaagcttttaaaaaatattaaaagcccaacaaataaaaaaagttctaaatctataaaattgacctcagtctgtatatttagatgagtcatgtgtatatagcgtttcacttcaaaatatatgataaatctctcattcattggcttaaaaataaacacttcaatcaagtctttatcagaaaaattgaaacgttaactcaattgccttttagttcatgtgactttacaaaacttaaaacaataaagtcagttttaaaaattattagtaaagtaaaagaaaaatatcttcacaatgtagacattttgtccacatgagacatgtgaaatattgccattactaaatatttgcaggtcaaaaactgtttccaaaacattttaaataatcatctggcctgtctgttttagagcattcaattctagctgaggtctggggacatgtgaaaggagccacggcccgactccgtgctgggaagagtcagacattttccacagctctgtcctttgctgtgggctctgcaactcctaccaattaaaattgcttacgtttttgttttatttttactaaagaggggttcctaaaagctaacattatactgagtatatgtaactaaaactactaagaaaacaatttcacaattatacaaatgtgccaagtaaatgaaaaaataaactgtattttaataaaggttataaaaagaaaaacatatagtggtgtgaggactgtctcaggtcttcactgagcaagggatcatgacattctatggcggacagctgaccttggctttctgctcctcttgattatgtctactaagtgacatacttactctttttccacctgtcttgcctctaagggtaacaggttttatgagatccctcctagtgctttgcaggtcagcctccctttgctgcattccaattttactgcctataccctccagctggcttttgatgacaaaagtcctggtcccagccattctcagattctgtcatccccgtgggcactatggagctcagcactatgggaggttccccaaaaatctcgttttctatgaggaatggccaccacctgcatctcagtgatgctagtgacccctttcctactcctgtgctcactggtcctcatgaagatcctggttggtctgtagccccctatttttcctattaaagagaaattacagtaagacccatttgtgtgcaaaatcaattttaggcttattacacttggcctgataatttgcataaaatgcagcaagaattcatcggccatataggctacttttgagttaattttcctgggtttttacctaaaaatatactattttggttagagtcttgtgaaaataaccaatgtgttcaattgttttattttaaaaggctcttactgaacactataaatatgtataagttgaatatacaaactatattgtcataaaatcacaacccaaaatgtggagaacgcagagggaaaggtaaatttgctcgcaaaaacatacttcacccaaataactggaaaaaaaaaaagactttcatgacccttctttaaccagagcagcagctttcaaacaaggtgtttgccttggaaatgccattcacaagccaaacggcccttgagagctgtctgtcaggcactgtagaatctagcagctcctcacagagttagaaatagtttcaggaaagagattccctgcttttagtaactgcactttatattcccagatagcgagattgtatgtaaaccatttttatcttattctggaactcttttgggtactttttttttttttttttaaatgatggagtctggctctgttgctcaggctggggtgtagtggtgcgatttcagggtatgagaaaatgcagctggacctggctctttccaggaagaccctcacagccaaggagtccaaagcctggggttttcatctaattccagtgtgactggggtaggagcagctttggtgctgggtgtgtgtgtgtgtgtgtgtgtgtgtgtgtgtgtctatgcctgtgtctgtttagggtgttaggctcgtggttgtctagatacaaatgtcccagggctcaggagccccagggttatgtcaggggcaccagatgaaggtgtcaacagaagttagggcacaagggacaaaggtgagagcaaggttagattcatttaggtgcaagaaatcatagagggaggagggagaggaagccctcctgctaccaccgaggaagaagcgcagcttaaggcagaaagcctgtccggagaggaagtgagtttgagggcagggctctctgggtaaagtacggtctgggacaccagcctgggggaagggtacagaatgcagagtggcctggcgtggggactaagaacagaggagagcagctttcactgggagggtcagtgttttcagtgtccagcactgagcaaggtgagatttgggcagcttgctgtgaaataaggtcaggctctggcattgtccccattgcgtgtgtgtgtgaggggcactttgggagagtgaactctccacctccatcctctcatacgtccttcaaccgagcttgccagttaccctgattccaaggagatctatttattgttgacaatactggatcctagcagaggctgggtaggagcctgggcacaagcaagtggaggagggggcctgggcctgaaagacctgggaggtttgagagaggacacagcccacagaatggagcagatggggtagagtcggcaagcattcagggctcctagtaagttggacaatggagaccctgaaagatccagtaaaacggggagaacaaacaggtccccaactcacatccttgcagtgcctggagcttcagactccagacaggtggggaaggaaaattgagggatgtgaacatgttggagaatgtcgtgccctgaagaatgaagaaaaggggggtgaggaatgagagcaggaacggcttccagtgcctggtgcccaggagaactcagaaaatgggtgtggtggagaggaatcgaggaaccggaagtggtggaagtgtgcagggcccctccgagatcactgtgactgccaggcgtcctccctggctggagagcttcactgtcctccttcccagccaaaatgtgtcccttgaaagcttcctccccaatggactggttctgggtcctatatatttgaaggggtggcctgcctctccacacctgtgggtatttctagttgggtgggaggagagacagagaaaagaaataagacacagagacaaagtataaagaaacaacagtgggtccaggggaccagcactcagcacaccaagggcctgcaccggcaccggcctctgagtttcctcagtttttattgattattattttcattatttcagcaaaaaggaatgtagtaggagagcagggtgataataaggagaaggtcaatgaaaaacatgtgagcaaaagaatctatatcataattaagttcaagggaaagtactatgcctggacgtgcactcaggccagatttatgtttctctccacccaaacatctcagtggagtaaagaataacaaggcagtattactgcaaacatgtctcacctcccgccacagggcagcttttctcctatctcagagttgaacaaatgtacaattgggttttacaccgagacattcagttctgaggggcaagcaggagacagtggccttcctccatctcgactgcaagaggctttcctcttttactaatccacctcagcacagaccctttatgggtgttgggctgggggacagtcaggtccttctcatcccatgaggccatatttcagactatcacatggggagaaaccttggacaataccccgctttcaagggcagaggtccctgcggctttccacagtgtattgtgcccctggtttattgagactagagaatggcaatgacctttaccaagtatactgcttgtaaatattttgttaacaaggcacatcctgcacagccctaggtcccttaaaccttgatttcatacaacacatgtttttgtgagctccaagttgggtcaaagtggctgggtcaaagtggctggggcaaagctacaaattaacaacatctcagcaaagccattgttcaaagtacaggtctttttcaaaatggagtctcttatgtctttcctttctacatggacacagtgacagtctgatctctctttcctttccctacatatattcatggaccacagtcttcaaggagtccatttcctcactgtttttggtttgatttctctgaaattaggaaatgccccattgaggcacccaggattgtctttacttcccccagagcttccactcctgaggcaggagcttctcaaacaccccccaagactcaacacctaatttcaccctctgaaaccttcccatttcttaaatccaggcagggtcatggtccttagcccctcagatgctgtggagaccttctttccctttcatacattctctcaagattaaaagccacccctcctcagcacacaccccagagactcaccccaacatgcattgcaaatcaccctggaaacagtcataagaccacactcatttaataatattttatttatcaaaagacactctttctcaggtaagtgaagttctggagaggaaaagaggagtcctgatgtaaattgccctgcaggccttgctgagatcacaaggagattgttactgcagcttgtagcacaatagtaaatttcttctctggatggaagttcaacaatccagatcgtagtatattccttttcattatgctcagtccagcaaatgtgatgataacaaattccttttcatgatcatccattcagcagagaaaatgtttgtaaatgtgttttcatgaagatgtttaccataacatacaggatttaccattatcaatgcatccacaaactctgctgttgttttttatacataattttttccatcgagaagtgatagttgtacatattcatgctgttcatatttcaaccacaaactctgctggtttttttatacgtaattttttccattgagaagtgatacttgtacatatttgtgctgttcatatttcatgtttcatcatccttttacaataaataggttatattgtattttaagtttttctaactgtagtgcagaaattgtactgggtgtatacatagatatcaaaccaaatttacttgttctggctgataatgcatcatttatttcatagattatgtatttctttgacacatttcacgtacaactaattgcataaaaatgaattttcttttagtatagacatcagcatgtgcttaattcggaatttaattgttgagttaaacatcgtcattgccttttccgttgttattaattgctctggtgggaattttgttatctcatacataagacagtgtgccacaatatctcttaaaatttcaatggcaataaactttatatttaaaaacagggaatctatggaaaacacatttttttctaaaggattaaaatatttttttaaaataattttctaaaaagttaggcacggtagcaaacgtctagagtcccagctactcaggaggctgagacaggaggattgcttaagcctacgagttgggggctgcagtgaactgtgattgcaccactacattccagccagggcaatagaagttaaccctttttctaaaaaaaaaaaaaaaagaaagaaagaaagaaaaaaagcaacaacaccaaaacctcaccaacaaaatggtaaagaaaaaaaaaacagcaatacaatgtaagctatttgatccaaagaagtcaatgaaatttaaaacaaatgaaagggaaaaagtaatacttgagtcctgcaggactcagtccaagttctgctgtgcctccctcacggtgagccacccctttagaagtcacttgggtcataagttaacccgataggaagtgtcctggccaatgaactagggaggtggtaaatggcaccattttaaatttaaattcacggccttttcaacggatcagtagccatgttgggtaagagtgcaaatgtcagaggtgaaaagaggcagcaggaccctcccctagtgcttgggcaacagaaggtggaatcactaaggggacaagactttagcatgctcaagtacacaggacagaaaacatgctttttacaaaagctggtaaatatgaagagggaacattttcaagttcctgtaaccaagaactaccgcctgtaaccggtgaaagtgactttctatggcaaaagcgtttttgaaaaggtgaggaagttaaatatcttaatgttgggaggttcttctggtttatctggctagaccctaatggaatcccaagtgtccttatggagcggggagcagagagagagatttgagtccagacgaggaagaaggtgatgtgagtctgggtgcgggacagggggagaatgatgctatgtggggatctgggctggggaatgacttagctgcatgagcggagtgacttagactcctgaactagaagaaatctagggctcatcacctcagcagccctaaccatcaaccttatttttattacaggtcttccatcgacggactccctaaaaagccagcggcgtggaggggcgccctctattggacaaatagatcttgactactttcggccctcaaatagcctgactaggcaaataacaaataataataatttttttttaaatcatggaaaatattttaaaaaacaattaaaaagttataaatctataaaatctgcttctgtctgtgtgtctgtatatttagatgtctcatgtgtacataatgtttcactaccaaaatatatgatgaaaccctcattaatcggcttagaaaactaaacacctaaatattttctcagaaaatacaaaaactttaactcaaatcccttttaattcacctgactttaaaaatctttaaaaaataaagcatgctttaaaattattagtaaagtaaaattagaacatcttcagaatttagacatttggtttaaattatacaggtcaaatactgcccttagtaaatattttcaggtcataaacaactcctgtaatcttttaaataattgaattacatgtctgttttagagctttaagttctagctaaagcctggggacaaatgaagggcaccatgccccctctctgtgctggaaagagacattttctacagctctgacccttgcagtaggctttgcaactgctacctatcaaaattgcctacatcctaagtttattattaaaaggagttgcttggagttaacattataatgaatatatgtaactaaaactatttctcatacaaagtatatgaaaaagtagaatgtatttttaataaaaagttataaaaagacatgaacatgtagtttttataaaaaacagtaattttgtctagttttgcagttctaaaaagttatgttaaattcaaaaataaaaaataacaagacaagactcaaggtttaaataagttgtaaaagatttgtaaaaattagttctataaaaattttacaaaaaaaagcattggttaaaatttaaggaattattttgtttttacagaaattaaacattcattaaaaacactctgatacaaggccttaatttgggttcatgtatcagaatagcagggttttcttagaatattaatctattctttaaaagaactatgaatgttatgcaaactttataaaaatcttaccttagagtcaaactgattaaaattccatagattttacgtaaaattttattaaaaattaacttcaacaaaaataaaatttgattttctcctttaaacaaaagttttgcgtaatattaaataataaagcatttttgtttaccttttaaactataaacacacacacacatacacatacaccaacactaaagtcagctgacctcatactgtctttattggatattcttgtttaaaaaactatcttctttggaaaataaagttttttattttaaaccatattttaaattatcattttgactaaatccataacatacagtgatctgtaataattctattttataatatcaagtgttttgaagaactccaggaacagccatgagagaacactgtggtttagtaacactttatttcctcagtttgaaaatagttgtctttcttggggaggccggtttcagcagatgaaaacaagagtcatgatgaaaattacccagcagtggttagtgtgaccataggaacattgtcatcaggtcagcagaaaacatatcagcaaatttttctcatactggcagtgtgtaggggtggatgtttacagttcctgaagccccagtggtcgtgtggtcttttagttttgccatttataggcaacttgtggtaactagctcaattagacacattccttatcacaaggacagagggctttctgtatcctagggttcttgccttggcattccagaagaatcaggtcacacgtggacgtggagaatgagtgcaaggttttattgagtggaagtagctctcagcagatgggggagccagaaaggagattggtttctccctggattggggccgttcagcagccctggctctcctctgactgccccaggcaaaatccacatcgttctataagtcggtgccctgctggtgtgctggtgcctgttgtcatgttcctcttcatgtccagccgcctgtgtgttcctccgctgatgtgctcctctcgacgtcaagcctcctgtgtgtctgactgctagggtcttggggtttttataagcacaggatgggtcttagcaggccaggatgatcttgggaaagacaacattcggtcaggaaaacaaaaatgcctgttgtcatctaggtccgtggggacaagcccaggtgtggagcttttagccagggaccacagcctcctgtatccaacacttcccttcaccttttctatatcattcaaagggatcatgcccttcccatcccagcacttcactttcatgtcatttgccccctctgaagaggtacatctaactgccattagaatatggatgatgaccagtcttagctgcttcctgctgaaagggggcattgttttgggggaaaacggcagtcagattcctcccaggggtctctataataaaagatcgaggtggctactttcaggaggtcctctaatgtactatctggtcccaagtcccatttctgcaacctcctcctgatgtcaggagctgcctgagtaataattttatcctttaggattatctgtccctcgattgaattaggagatagagaggtgtgatttaccaaggcctctcttagcctctccaggaaggcagtgggattttcatcaaatccctggttaattatggacaacttagtataattgagaggcttggtcttagacctacgtaagccctctattatgcacacctgaaagtgtctcctcttccagtcttccatctcattattgggatcccatttagggtccttcactggtgctacttctcttccagttggataatattcgctcccttccctgatgctataggtgatgcaaagctcatccccaaatctctctgctgctggcagagcagcctgcttctcagtgtctatcaggttctgactcaaaagtaacataacgtctctccaggagagttcaaatgttagggtgaaattctggaaagcttctatatatctatcagggtcatctgaacacttgcccagatctcccttaatttgctttaagtcttgtagggaaaagaggacttggaccttactgggcccaaattcactgggcatctgtaggaggggcaagagtgagactgggcttgtttgggatgaagatttctaggaggggccaggtgagaggctgaagctggatacggaggttggggtggacccagaggagcagggcttgagggagctggcacgtcagctgggggtgcgtctgggactcgtgtctttaattccctgggcttgaccctggcagccttccccgagacagcaaacaggagggctggaacaatcctacatgtcagcaaaggtctggattgctttgcaaggtatagaaagcctgcacatttggggcctcagaccatgtgtcctcacatccagagaaaagttctaattgcaggatggtattgaaatgaatggtcccttcctgaagccaagccagtccttcctgtaaaccataatttggccaaacctatgtgcggagggctatgagatgcttttcctctggattctgagggtcaaaacagtcccaatggttcaggatacactcaaggggagtacaagctgggggtggtgaggagaactggctgcccattctgaaagacagggaatagaggtgttcctcatttcccttccttcttttggcaaaaagctcagggtgtgatggggagggaaagcaagcatcttcacttcactttccacctcttacccctgcgccctggcaaccttggcaggtgccggccacaggtacaaatgcggtatgtacccatgaagcagggagaacctggagattaggaattaactgccctcacctatgtttccttttctccctgctgttgaaaaactttgagttccctgggcctttttatcccatgaggcatggcctccttctgtgggatggggttcagtcagcaggaattggtcctgtccatttacattgtgcctgttgcctggctttgaattcctcagacctgctttctctttctagggcctcagcctgaagcttggaattgagtttgggactgaaaaagcatttcagaggctgtttatatccatttagtgcctcaaataagccctgctgaatttgcaattatcagccagcaggggtcactcctctgttaacttccctattagaaacagagcggtggggattctcacttagaaaagaaaaaaagagaaaaacagttaaagaggcaaaaagtggggaatgctgggggaagaaccccttgcttagtgcaagtgggcccctctaatccttataactttcccatccttcccccagttcagaccaggttgaattccttggccatggaaggaaaggttccattgatgcagtgggtgagaagcactctgtagggtcctggctaccatcggttttctcacacccccctcatcccaggcagtggagggagacacttctgcgacattgctccccctgccccttcatggctattgggtgtggcctttgcctgctgcaggcatgcctaggtgctggagctgggagggaaaagggtaaggagaggtgccctggaagccgctcatgcctggggctgtcaaggtggaggcatacatggcacctctaggaaaaattggtctgatttgcacctttggcggctgagccaaatgctcattttacttagtaacattgcctcagcctgtagcaaaactcttaacattataaaggaagagataagatccatttcaaataatgtgtgagagagaaaagagatgaaaggaaaacagagtcttttacctgcaggaaagggagagaagtggcagagttttggaagaaaggcaggcccaacagtttcccattcactcacactcaccttccgagatcccagacgagccaccagttgaaatgggaaaagtttccttgtccccctcacaggaggtggagtgggggtgtggcttgcttctttagtactccgctgctcaaacctctagggaagcatacagactggcaagttgtggggctacaaccccatggcagcatctaggggtagatgtttacagctgctgaagccccagtggacatgtggtaccatgtgctcttttagttttgccatctataggtggctttgtggtaaccagctcaattagacccattccttaacccaaagacagagggctttctgtatcccgcggttgttacctaggtgtaccagaaaaatcaaatcacacgtggtcttggagaatgagtgcaaggttttattgagtggaagtagctctcagcagatgggggagccaaaagggagaatagttttcccctgaagtcgggttattcagcggcccaggctctcctctggctgccccagccaaactctatgtcaatccattggtcggtggcctgccagagtgctggtgcctgttggtggattcctctcagcgtcgagagtttttccctctcaggaaagggagagaagtggcagccacccatgtgttcttgcactgatgtgctcctctcgacgtccaacctcctgtgtgtctgcctgctagggtcccagagtttttttaggcacaggatagggcatggtgggccagggtgatcttgggaaatgcaacatttggtcaggaaaacaaaaatgcctgtcctcatctaggtccaggggcacaagcccaggtttggagccctagccagggaccccggcctcctctacccatcactttccttcaccttttctgtatcattcaaagggaccatgcccttcccttcccagcacttctcttctgtatcaataggtgatgtttttaaaatttcccaactctagtgcaggcatggtactagacatatacatagaaataaaaccacacttattcttctggctggcaagacatagtatttttgccaaattatgtgttgttttgaagcattttatgtacccctggtcatataaaaataaagctattttgttcagtacaaacagcagcattttctggattagaaagttaatcatcttaaaagatcatcacggatttttccattgcactcatcactaattgctttggcaaaaaatttcttatctcacgcatgacaaaatcagccgcagtatctcctagtaatttaatggtgatgatctttataaaggaaataagcacatcaagggaaaacataattttttttaaaaaaagagtaataaaactttttaaaagtcttttttaaaagactgcttttctaaaatagtaaaataaaactccaccaataaaaccaccaacaaaacagaaaagaaaaaataatgatatgatcggagctatttgatgaaagatggtaaattaaatttaaaatgattagaagagaaaaagcaatacctgtctcccgtaggtctcagtccaggttctgctatgcctttctcctggtgagccacctatttaagagtcgcttaaagcatatgttaatccaacaacagcagattaaaaaccaatgcaatctgaactatttgatctaaaaacataaataaaatttaaaacaaataaaagagaaaaagcagtacctgtgtcctgtaggtctcagtccaagatctgctctgactcccttgtggtgagttagccctttagaagtcacttggggtggggcatatgttaattccactaacattggttctggccaatgagtcaggaaggtggtaaatggcaccttttcttcttgctgatttctttcagttcctttggagtctggacattagtcctttgtcagatgcctagtttgtgactactgtttcctatactgtgggttgtgtgtttaccctgctgatatttcttctgccttgcagaagattttcggtttcattaggtcctattgatcttattctatttttatatttttgcgtttgcttttggggcattagtcatgactacttggcctaagccaatgtctagaaaagctttttggatgctatcttgtagcatttttagactttcaggtcttagatggaagtttttatatgctttgttaaagatcaggtgactgaaagtaccgggctttgtttctcggttctctattctgttccattgctctatgtgcctatttttatacttcctgcaccatttattgaataaagtgtcctttccccaattagtgtttttgcatactttgttgaagattagttgtctgtaagcatttggctttatttctgggttctctattctgttccattgctctatgtgcctatttttatacttcctgcaccatttattgaataaagtatcctttccccaattaatgtttttgtgtactttgttgaagattagttgtctgtaagcatttggctttatttctgggttctctattctgttctattgctctatgtgcatattttataccagtatcatgctattttggtgattgtagccttgtagtataatttaaagcctgccttcagatttgttctttttgcaaagtattgctttggatatgcggtcacgtttttggttttgtataaattttaggattcttttttctagttctgggaaggagaatgatgatattttgatgagaattctactgctctgtagatggctttggagagtatggtcactttcacaatattgattctacctattcataagcttataatgtgttcccatttgtttgtgtcaactgtgatttctttcagcactattttgtagttttccttgtaggaaacttacattaacctacttggttaagtatatttctaagtattttacttattaaaaattctcagggaaatgcaaagtaaaactgaggtgggaaattaaagaaaaataaaattaaaaagaaagggaaataagctttcttgtattaagctaacttgtcccagaggcagcaacaggcacagcccagacccaggaaaagtcttgataatattatttattgtattctggagactcttccagcactccttcaatgtagggagaagaaaaacaaattttcctttgttttatggtatgagtttatagattcttgttctctttaactagtaacttcaagtattctgttttatctaagaagtatggcaaaggtcatgagaagcctgagcaggcctgaactacagctctctaggcaccatagtgaagataaaccaatgcaagcctctttagagcaaaacctagataatagacatctgggttgcatagcaacagttatgtgcaatcctgagttatgaacctgttacaatttgattaactgtctttttcctgcctctgtatccctgctttcacaccactgtaagcttgcttcaagctggcccacccccttttgtgaagtgtgtataaaagtcaagtgctgtctttgttccaggccctgtctttggacgtgagtctgctgggcctgagagcactcaataaaagattctcctgttttaacccaaagcctctctctcatcctcctaaatcccacaacaaaaccacaatgagatgctatcttaatcttgctagaagcccataatttaaaagtcagaaaacaatagatgttggcatagatgtggtcaaaagggagcactttgacactgctagtgggaatttaaactagtccgaccactatggtaaacagtatggggattccttaaagaactaaaagtagaccattcattccagcaatcccattactggctatctacccaaaggaaaagaagttattccataaaaaagacacaagaatatggatgtttatagcagccgattcgcaattgcagtgatatgggaccaacttaagtgcccatcaacgaacgagtggataaagcaaatgtggtacaccatggaataatacttgataataaaaaggaacaaaataatgtcctttgcaacaagttggatggaactggaagccattattctaagtgaagtaactgaggaatggcaaatcaaatattgaatgttttcacttttaaatgagagttaagctatgagaatgcaaaggcataagaatgatataatggacttggggactcagggggaaaggttgggagggggatgaggaataaatgatgacatattgggtatattatacactgctcaggagacagatgcctcaaaatctcagaaattaccactaaggaacttttatccacataaccaaaaaccacatatattccacacactattgaaagaaacataaacattattttaaaaaataaagccacttttaaaattagcaaaataaaataaatatgtcttcagagtttagatattggatccaaattagacagatcaaatactgcctttactaaatattttcatgtcattaacaacttctaaaacctttcaaacagttttttgacatgtcttggaaccatccatttctagctaaggcctgggcacctgtgaaatagggccatgcccccccttatactgggaagagtaagatatttcaagactaagatgttttctacagctccatctttttctttaagctctacatcaaggacataattaaaattggttgtctcctaagtggtttactaaaaatgcatacttaagagttaccattataattaatatttgtatctaaagctacttaaaaattttcacacacaaatctgactgaacaagtaaaatatattttaagtcaaagtttataaaaggacatgagaacatagcttttatgaaaaaattagttttgtcaagtttagaggttttcaaatattttaaattcaggaaataaaataacaaaaagacaaaagaaaatggttgaacaacttagaaaaggtttgttaaaattcatcttataaaacaatctacatgtaaaaagtgggctaaaatttgaaagagattatttaggttttccataaattaatccagaaggggtaggaagtcttaagaatgaggaaggacaggaggaaggggaggtcatcctgacactgcagaggcagaagtgcagctgaaggtatgaaggctaagaggggaggggagtttgagtgctgctgcctggctgtcagagcagaggagggtcctgggcaccagacttgaggaagggatgaaaatgctgggcagacctgtagtgggcccttgagatggcagatagtggtttccagagagagggccattgttttccagtgcccagcactgagcagagagagttttgggcagtgtaaaaaaaaaaagagaacttacctctttctcgttttagaaaaagaacagtctaagaatatcagcagggaaactctcagtgcttcaaggggttaaacgcccttttggctttcttgtgttggtttcatcatagaggaggagaaacttcttggaagtgttcctaaaaacacaacacgtctgcttctcctttcaaaaaaggaagtgctaaaacacgaacactctagatccaaatattaatacggatgtctaaatgcttccgttttccaaggggcagaaagctaaaggttgtaacctattcatttcagtcaaagttggtgaaagggaagcaaaggaactgggtggggcttggaaggatgacgaagctcaagctcattggccagcaacctctctcctgggggcgggaggggtgagcatacgtcattgctttggcttctataaaatgaggaggactcaccgagtgtgaagagtccttctggtgattgcagctgagagcacactcacgacgttctgcaaggattctctgattatgattctgaagggaaaagcgatggaatggacagcagagattgtaattttctttatcttgaattacggaagaaagtatctaggacagaaatccacgacaagtccttggaaccagcagatctcttcgttcacggagacgttgacgtattctctattgaagaagattcttaccttcttactggacaaggttttgtcagttctgcgtgactggattgtccgggagactctgaggaaactgatgtcacatgtttttccaaagaagatgtttctggaaccaacaactgtgattgtggtttgaggacttctgagagttccagtacaggaaataagcagaacatcagctggaggctaaacggatccagacttcactcttcacttcccttcctattcagtctattgtgcctgctgactgagaagcttggctggtatgtgagcaaataaacggaactattcagaaggagatgttgacatattctgtattgaagaagatccttatcttctcacctgacaaggttttgtcagttctgtgtgactggattgtccggaagactctgaggaaactgatgtcacatgtttttccaaagaagatgtttctggaaccaacaactgtgattgtggtttgaggacgcctgggagttccggtatgcgaaataagcagaacatcagctggcggctgaagggatgcagcctccactcttcacttcccttgccattccatctattgtgtctgcctgactgagaagcttggctggtatgtgaggaaataaacggaattataaacaaggagattgtttctcatctacttcattctgttgtggcttttctattttggggttcagggtgtgtgacaaggaccaaggagatgaaaggtttcatgatggagaaagcccaggcaatcagattgaagagctatccacagggaatcttggctgctgaggggctgcaccctgcaacggactgaccatatgacagaaaagggttttaaaggctcaacttctggactgagaacccagagtaatttgggaacctcctctgtgaggagatatgaaagctgggaatcatgacatccctaggaatggaaggcacatttcctgatggaaggggtgctttggaaaacaggagcagagtagacacagcagccttgtggatacgggtgggcagcatgcatgggtgatgtgaacgtggagtgtttgtgatcgaaactcaaaatgtctgacaaagtgaaaacctagaaaccacaatgaggaggaagagtttgtgagggcaatcactctccccatgtgtgaaaatcgggggctcttaaaatctcatctggagaggtgcagtctaccaaactctgggactttagcctccccttttaaaaaaccgtgcatcaataccaacgtccgaaaccacagaaataacacctggcttgcatggagacaaggacaaaaagccgtcatgatgagttgttctgctcacttgctgcctctgttcagtgcacaggatattgtccacccactagcaggctactgcaagagaagtgtgcaatatgttccctatgtgccatatatgtgccatatggcccatatgacaactgagtcagaaaatatctgatgccctcagagttacactccacctggagcttgcccccagccatccaggacctaggctccctaccctgtccaattttctggtgttttgggggcttcattctctaaggtgtgcccactctttactcaaaccaaaacacccacatattcctgcccatgaacaaccaatcaaccacttctcagttccacatcctgctgttgggtctctagtggtgacactgtaactcccaggtcatagtggtgacactataacacctagctaaattgatgccttgtctctaggaggccatgggctcctgcaggtctcatctgactctctgtagccttccctgacaatgctcacaatacccaagccagagccacattgacagcaagctgctctcatcttacctttgccagacctggccactggaaaaggctgaccctcatcctgcaatgcctatacctccaacctttgtctcaagctggtgtcctggagggacttctaagcagaaaacagattcagactcccatcctctcctgaatggcctcatatccaattctcagaccctcagccttcattgtaaggacacttcatccatgcccttgagtattctgtctgcactgtgtattctgcaatagattctcctccctctgcgaccctcaactccttccgcagactttttgttttcttgatcatctaccatagtcttccactgggacactgccaagcccattctggagagtgagttgtgcaagtacactgccccccatctacctttcgggaggtgtatacacccttctttctcccaggtctggaggctttctattttcatcctgaggcatctccacctgctcttggattcttcaaattgacaaccaccagttaacaagaactatgtgtcaccaaatagccaaacaatggcaattacaaaaataaaattaatagctgtaacccccattagcaaggatacacaaatcaaatcagggatagtgggtgaggaagtctgcctaacattcaaggaaggattctgaagtgatacaaaatcattgcctttgctatctttagaatggacactttcagccaggcacagttgctcagcctgtaatcccagcactctgagagccccagttgggtggatcacttgaggccagcagcttgagaccaccctgggcaatgtgcagaaaccccaactctactaaaaatacaaaaatagccagttattgtggcacatgcctgtaatcccaactccttgggaggctgaggcacaagaatcacttgaatctgggagccagagtttgtaatgagcgaagatcatgccactgcactctagcctaggcattagagtgataatctgtctgtggaaaataaaaacattcctcttcaaagttttcttctttaaatcataaatgttggaattaatatatcctctttgaaactcactttcttcaagcttctttatttgatggtagtaaatctttgttaagctttatgaggcaagagtaatggaagaagcatattatatatatttatactctaacctcagtgcttgttctagcaagctcaggcatgcgtgaatgtgcccaggcatgttccagcccataccttatatcctttccttattgggaaatgctgttactcctataagcattcttgtaagcaacttcctctttttctttgtctccactatctttacctattgaggacagttttaggttcttagccagttggatgtagcatagactgtgaggtccaaccccagccaatggagatagcacacagcagtagcgacctcatgcttaacagataaatattcctgtctccctttgtttggggtgctctcagctgatgagcaacaccctttctaaagaaattaaagttgtcttgctgagaaaacttttggtctaaatgctgattcttccttgcagcactgaagaagaagcaattatttccaacactttctcatacacaaaaaaagaagaaggtggaagaaaactttcttgtgcaccctatccctcactcagaaagacaacagaaggctcctagtggcaagccctagaggattcatttcttttgggaaccctcttggctgggatactaggactcaggtcaaactcagcattttcagtgtgtgggaagtgtgcttgggtttcactgttacttccaataatgtgatttggtccttggggttcaccaaattttggtatggagtggtgaaccctgttaagtttaagtgtctataaaattaacaaagcaaaataaccattctgccccatggttcagagaccaaatattgtgtaggaaatgctttagcgagagaaacagagaagaataaaaaatgtcctcaagcgctgcattatttcttgttatcgtccagatcttagaggaaaggctttcattttccctcattcagtatgatattagctgtgcatctgtcatttatggcttttattatgttggggtatgttccctgtgtatgtagttttttcagggtttttgttatgaagtgatgttgaactttatcaaacgtttttcagtttcagttgaaacgatcatatgctttttgtccttcattctcttgatatgatgcatcatgttgatgatttccatatggtgcactgtccttgcatcctgggcatgaattccacttgatcatgacaaatgaatttttaatgcattcttgaattccgtttgctggtattttgttgaggatttttgcatcaatattcatcagagatattggcctgcagtttctttttttttcttttttctttgttttgttgtttgtttgtttgtttgttttgatgtgtctatgtctggttttggtatctgggtagtagtgttccatccccttttattttttagaataatttgaataagactggtgttggttctttaaatatttggtagaattccgaagtgaagtcattgggccccgggcttttctttagtggaaggctgtttattatggcttcaatctcgttacttattattggtctattcatgttttgaatttgttccttatttaatcttggtaggctgtgtgtatctaggaatttgtccatttcttttagattttcaaatttattggcacataattgcccattgtagcctctaatcgtcatttgagttcctgcagtaccaattataatgtctccttcttcatttttgattgtatttatttggatcctgcccctttttttcttacttaggctgcctaataatttcttaattttgttgaactttttcttttgtttgtctcgctctgccaccaggctggagtgtagtggtgtgatcttggctcactggaacctccgtctcccaggttcaagcaattctcctgcctcaccctcccaaatagctgggactacaggcaagtgccaccactcccagctaatttttgtatttttagtagacacgggttttcaccatgttggccaggatggtctcgatctcttgacttcataatccacctgcctcagcctcccaaagtgctgggattacaggcatgagccactgcgcccagcctaattttgtttaaattttcaagaaatcaacttcttctttcattgatttctgtattttttatttccattttatttatttaaactctaagctttattctatcttcttctcattttagctttggtatgcttattgcctctctagctctttaatgtgcattgttagattgtttatttgaagttcttcctctctacaccataagacgtaagcatgtcctcattatgtcataagatgtaaccacttacagctataaacttccttcttagttctgcttttgctgtatctcataggctttgttatgttgtgtttccattatcaattgtgtcagaaatttttcaatatttttcttaatttcttcattgagcaactgatcatttgggagcatatttttaaacttccatgtacttacatagtttccaaaatacctcttgtgatcaatttctagttttattccactatggttcaagaagatgcttgatattatttcaattttttttcacattttaagatgtgttttgtgacctaacatatggtctactttttttttttattaaactttaagttgtggggtacatgtgtagaccgtgcagttttgttacataggtatacacgtgccatggtggtttgctgctcccattaacctgtcatctacattaggtacttctcataatgctatccctcccctaacctccaccctctgacaggacctggtgtgtgatgttcccctccctgtgtccatgtgatctatttttgagaatgatccatgtggattagaatgctgtggaaaagactttggattcctaatatccagggagggagacgatgatattactttcaatatcacacgggtgtacacactctctgtgacattgttcctaatatccagtggaagagaggatgatataacacccagggagggagaggatgatattactcttaatattgcagggtgtgtacccatgcctatgatattgttcctaatatcaggagggggagaggatgatattactcagaatatggcagggggtgtacacacactctgtgacatggttcttaatatacaggggagaatgggacaatattactctcaatatcgcagggggcgtacaaccctgtgatttgttcctaatatacaaaaggggacagtatgatattgttcctaaaatcgcagaaggtgtacaacgccctgtgatattgttcctaatatccagggcgggagaggatgatattacccccaatatcacagggggtgtgcactttccctgttacattgttcctatgatccgagtggggggaaatgacattagtcccaatatcgcaggatgtgtacactactcccccatgatattgttcctaatatcaagggggagagaggaggatattactcccaatatcgcaagggaggtacatcctccatgcaatattgttcgtaatattcaggaggagagaggaagatattactctcaatatcgcagaaagtggacacccaccctgtgatgttcttcataatatccagggaagcagacgattatatgactttcaatatcgctgggagtgtacatcccttttgggatattgtttctaatatccaggaagggagaggattatattacttccagtattgcagccagtgtacacatttcttgtgatattgttcctaatatccagaaagggaaaggatgatattactcccaatattgcaggtggtgtacacccccctctgatattgttccttacatcaaggaaaagaaagaagaatattactcccaatatcgaagagagtgtacacccctcctgtgatattgtatttaatatccatggggaaagaggatgttgttactcccaatatcgcagggggtttacacccacactgtgatattgttcctaaaatccagtgaaggagaaaataatattgctcccaatattgcagggtgtatacaggccctcccccgttatattgctcctaatatccagcggtggagaggatattactttcaatttttgcagggagtgtgtaccccctctctgatatttttctaatatcaaggatgggaaaggatgccattactcccaatatcgcaggaggtgtacatgccctgtgatattgttcctaatatccagggaggtagaggatgatattactttcaatattgcaggggctgtacaccctctatgatgttgttattaatatttaggttgggagaaaatgatatttttcctaatatcctgggaaggaaaggatgatattactgtaaatattccagggagtgtacaccttcctaatattctaatattgttcctaatatccaggggtgggagaggattatattactcccaatatcgcagtgggtgtacacccctcctgtgatgttgtttctaatatccaagcgaggagaaaatgatatcactctcaataccgcagggggtgtacaccttccccatcatatcgttcctaatattcagagggaaagaagatgatgttactttcaatatcgcaggggttgtacacaacccctgtgatatttctcctaatatccaggaagaaagaggatgatattgctcccattatagcagacggtatacgcctccctgtaacattgtttctaatatcaagactgggagaggatgatatcacttccagtatcgcaaggggtgtacacctcccccgtgatattgttactaatatccagggggaagaggataatattactttcaatattgcaggggctgtacacccccgtgatattgttgttaatatttaggttgggagaaaatgatattagtccaaatatcgcagagagtgtacacacttccgataatattgttcttaatatccatgggggagacgatgatattacacccaatatcgcagggggtgtagtctccccttgtgatattgtccctaatattcagggaagtaaacgatgatgttagtgtgaatattccagggagtgtacaccccctttgtgatattgtcctaatatccgcaggagagaagataatattactcccaatatcgcagggggtgaacacaccccctgtgatattgtttctaatatccaagcgaggagaaaataatattactcccaatgtctcaggggatatacaccttccctatgatattgtttctaatattcaggtggaaaacgggtgatattactcctaatatccaggaagaaaggggattatgttactccccttatagcagggggtatacacctcccctgtaatattgttcctaatatcaaggctgggatatacgtggggggaaggatgatattactcccaatatcacaggggttataaaaccttctgtgatattgctcctaataaccatggcggaagaagatgatattactcctaatattgcaggaggtgtacactcccccattatgttgttcctagtatgcagaaaaggagaggatgacattattgccaatatcgcagggtgtgtacaccacccatgatattgttcctaatatttagagggacagaggatgatattactcccaatatcgcagggggtgtacacgcatcccctgtgatattgttcttgaaatcgaggggaaagagaattatatttctctaaatattgcagagggtgtacaccgccccctgtgatattgttcctaatagccgggggcggggggagataattaaattactttcaatatctcagagagtgtacatcccccttgtgacattgttcctaatatccagagcaaaagagaatgatattcctcccagtatcgcaggaagtgtacatttaacctgtaatattgtttctaatatccagggggaagagaatagtaatactcccaatatcgtaggggttgtacaccttttctgtgatattgttgcaaatatttagaagagagagagaatattactcgcaatatcacagggaatgtatacttcccctgtgatattgttctaatatctagaaaaagagaggataatattactcctaatattgcagggggtgtacacccccacttgtgatattgttcctaatataaaggaaggtcgaaaaacaaacggggagcccagggggaaggaaggcaggcgaggaagaggcagcgccggggcgccggagggagcagccgggccgcggaagcgcgagcacgagaccggtcgcggtcgcagtcgcatttttgccgttgtcgcggccgccgccgccgaggcttacccggggatgtctgagcccgcgcctcgcggcccccaagctccacgctgcgcccgctgtcccggcctctaagggccgccacgtccctgcggcgcgcgcaggcagaaagcggcttcgtgccggcggagggggcccgggcgggccgggaaaggctgccccaggccccgcgcctaccccatcaccgcggccggcgccgggccgggaggatgagcggtgtggggctctgaagcatggagggggttttgtacaagtggaccaactatctcacaggttggcagcctcgttggtttgttttagataatggaatcttatcctattatgattcacaagatgatgtttgcaaagggagcaaaggaagcataaagatggcagtttgtgaaattaaaggtgacagctttggaggggaccacccttgattggatacataaattctgttcattcagcagacaacacaagaatggaattaatcattcctggagagcagcatttctacatgaaggcagtgaacgcagctgaaagacagaggtggctggtcgctctggggagctccaaagcatgtttgactgatacaaggactaaaaacgaaaaagaaagaagtgaaaccagtgaatcgctgaaaaccaaaatgtctgaacttcgcctctactgtgacctcttaatgcagcaagttcatacgatacaggaatttgttcaccacgatgagaatcattcatctcctagtgcagagaacatcaatgaagcctcttctctgcttagtgccacgtgtaacacgttcatcacaacgcttgaggaatgtgtgaagatagccaatgccaggtttaaacctgagatgtttcaacggcaccatccggatcccttagtttctcctgtgtcaccttctcctgttcaaatgaggaagcgttctgtcagccaccctggttcttgcaccagggaggagtagccactgtataaaagaaccagtatctgcacttcaccgactctcccagcgacgccgaagaacctactcagatacagattcttgtagtgatattcctcttgaagacccagatagacctgttcactgttcaaaaaatacacttaatggagatttggcatcagcaaccattcctgaagaaagcagacttatggccaaaaaacaatctgaatcagaagatactcttccatccttctcttcctgaagaaactgtagtgtccaactttctctaagtattgctatgcaaaagctgctgtaattgaactattgttatagggagtagttttttcccttaggactctgcactttatagaatattgtaaaacagacaaacaagaaaacaaaccacatacttttgaagcgtgttttatctttatatagtttgtttgcaagagtattttcctaataacttcacagtatgaatgtgcatcttttttttctttttttaacaaatgatggtgtaacattttgacatccataaggacaaatgtagatatttttctaaaaaaccgtgaggggactgacagcttggtcagggtgtattgtagcttataaacatgaaatcttacaaggtttcagtttgacagaagtgtgatatatgtaacttgtgccatggaccaaatggtcactttaccacagctaaaaatgagttatgatagcagcttgatggtgattgcattgtattcctttaatcaaaaaggaaacgcaatattctaagtatctttagcccaaataccatgacatattgagcatctttaaataaccagactgtattgtccttcatatgtgaagttgacactactgatttgtcaataccaaattttgggttaaagtgtttaatttttatttatttattttcttgttgcctcaaaagatgattgcattctaacttttgtgacctaccaaatttaagatgtgtatacattgttctttacgttgttctagaaaagagattttaatgctgtagtgacttagctcacttacatcagagaaataaacaactttcaatggaaaaaaatatatataaaggaaggaagaggatgatattacttctcatatagaaggggttgtacaccccccttgtgatattgttcctaatattcagggagggagaggattatattactcccaatatagcagggagtgtacacccccccccccgtgataatgttcctaatattcagggaagcagaggatgatattactttcaatatcacagggggtgtgctgtccccctgttatattgttcttaatattcaggggggagaggatattattatgcccgatatcacaggagaagtacaccccacaagtgatattgttcctaatatccaggggtaaagaggatgatatcgcaggtggtgtacacccctccccgtgatattgtttctaatataaagaaggagagagcatgatattactcccaatatcgctggaggtctacaccccccttgtgatactgttcctaatatccaggaagggaaacaatgatattgctgtgaatattccagggggtgtacacccctttgtaatattgttcctcatatccagggggtagagaggatgatattactcccaatatcgcagggggtgcacggccccactgtgatattgtttttcatatccaggaggggagaggatgacattactctcaatatggcagggggcgaacaccccctgtgatattgtgctagttaggttgggagaaaatgatattactcccaatatcgcagggggtgtacaccgctcctgtgatattgttcctaatatccatgacgggagaggatattactcccaatatcgcagggggtgtacctctcccctgtgggattgttcacagtatccaaaagggaagaggatgatgttactcccaatatcacagggagtgtacaccaccattgtgatattgttcctaatagccagggaagaaaacgatgatattattgtgaatattacagggggtgtacacaccccctgtgatatggtttttaatatacaggttggaaaaggatgatattactcccaatatcacaaaaggtgtacacacccccccatgatattgttcttaatacttcggtggggagaaaatgatattagtctccatatcacaggggtgtgaactcctccggtgatattgtttttaatatcaagaggggaggagatgatattgctttcaatatcgctgggggtgtacatccctcctgtgatattgttccttatatccaggcgaggggaaaataatattactcccaatagtacacaccccatgtggtattgttcctaatactcagggggaaagaagataatattactttcaatatcacagggtttgtacacctttcctgtggtatagttttcaatatccagggggaaggtacatgatattactcccattgcagcaaggggtgtacacacctcctgtgatattgttcctaatatccagaagtggtgaggatgatattactcccagggggtgtacaccccacctatgatattgtttctaatatccaggggaaaagagtgtgatattatgcccaatatcgcagagggtgtacacttatcctgggatattgtttctagtatttggggagggaggagaggatgctattattctcaatatcgcagaaattgtacacccccgctgtgatattcttcataataatcagggaaaaagaggatgatattactaccaatattgcagggggttacacttcccctttggtagtgttcctaatatccaggaagaaagaggatgatattaatcccattttccaggaagtgtacacccaccgtgtcatgttgttcctaatatccagcagggaagaggatgatattactcccaatatcggagagggtgtacacttcccctgttatattgtttctaatacccagggggaagaaggatgacattactgccaatatcacagggtgtgtaccccaccctgctattgttcctaatattcaaaaggaaagatgaaaatattactcccaatatctcagggtgtgtacacctctcctgtgatatcgttcctaatatccacaggaagagagaatattactctcaatattgcaggggggtgtacacccccctgtgatattgttccaaatattcgggcggggagaggatgatattagtcccaatatcgcagggggtgtgcaccaacctgtgatattgttcctaatatccatgcgggggaggacgatatcactctcaatgtcgcaggaagtgtacacctctcttgttatatttttcttaatatccaggagggaaaagatgatattactgccaatatcgcagggtgtgtccaccccccttttatattgttcctaatatccaatggaaaagaggatgacattgctctccatatcccagaaggtgtacaacgcccctgtaatattgttcctaatattttgggggaagagaggatgatataacttataatatcacaggaggtgtacaccacccctatgtattgttcctaatatcctttaagggagaggatgatattactcccaatatctcaggtggtgcctattccccctgtgatattgtttttaatatccaggggaagagagtatgatattacgcccaatatcgcagggggcatacaccctctctgagatattgttcataatatatagagggagagaggatgatattacttccaatatcagaggtggggtacaccccccggttatattattcttgatatccaggaggggagaggttgatattactggatatatagcagggagtgttcacatcttctgtgatactgttcctaatatccagaaaagtagaggatgatattactcccaatatcgcagaacgtgtacacctccctgtgatattgatcctaacattcaaaggggagaggatgatattactcaaaacatcacagggcatgtacactcccctgtgatattgttcctagtatccagaagggagcaagataatattactttcaatatcgcagggggtgtacacccctctttggtatgtttcctaatatccagaaggaaagagggtgctattactttccatattgcaaggggtgtacacccccctgtggtatggttcataatatccagggagggaaagggtgctattattccccatatcgcgaggcatgtacaccctgctgcggtacggttcctaatatccagggggaaagaggatgctattacttcccatatcgcggggtgtgtacacccccgtgtggtatgttttgtaatctccgggaacgaagagggtgttattacccctcatatcgctggaaatgtacactcccctgtggtacggttcacaatatccaggggattgagggtgctattactccccatatcgcggggggagtgcacctccctgtggtatggttcgaaatatccagggtaagagagggtgctattattccccattttgcaggaggcgtacacccctctatggtatgttttgtaatatcccaggtaaggggtgctattgagagaagagagcaaaagaccccccccatattgttctgtattattttatactcagtacctgttttaagaagaaacaaggaagcgaaaccaaaggcaggcagcccggcgccaggcaccagatccaaaaccagacccgaaaccaggcctgggccttcctgaccttagcctgaaagttaaaattcaacccatgacctagcaactgatgttatccatagattccagacattgtatggaaggacattgtgaaatttcttgttctgttctgtttcactctgagtactggtgcatgcagcccttgtcacatacccactagattgctcaatcaatcatggccctttcatgtaaaaaccttagtgttgtgagcccttaaaaaggacagaaattgtgcactcaacaagcttggattttgatactctagtctgctgatgcttccagctgattaaaagccacttccttcactacctcggtgtctgtgggattttgtccgcggctcctcctgctacactgtgactccccttatagagaggggtgtacacccccctttggttcctaatatccagcgggggagtaggtgctattactccccatattgcggggagtgtacacccccttgtagtacggatcgtaaaatcaaggagggagagaaggtgtaattatccccatatcacagggagtgtacacccctttgtggtatagtttgtaatatccacgacgggagagaatgctattactccccatatcgtggagggtgtacaccgccctgtagtatggttcgtaatatccggaaggggagaggttgctattactccccatatggtgggaagtgtacacccccatgtgatatggttcataatatccaggggggtagaggatgatattacccacaatatcatagaaggtgcacacccttttgtgatattgtccataaaatccagaaggggagaggatgatattacttccaatatcacagggggtgtgtagccccatatgatattgtttgtaatatcaaggtagggagaggatgctattccttacaatagctcaaggggtgtaaccttcttgtgatattgtttgtaatatccagaaggggagaagataatttttttattttaaaagtaaactttaatgtcaaaaatgcaaacttgagaagggcagaaagatcaaacagaaggctgccacttcacaattggagggttgcacagtggccgggcagaggcgctcctcactccccagacggtgaggcagccgggcagaggtgctcctcacttccgagatgttgcaggagccgggcagaggtgctcctcacttcccagaacagggggctgccgggcagaggtgctcctcactgcccagacggtttgcaggcctggcagaggcactcctcacttcccaaacggagcagcggcaagccagaggcgctccacacttcccagatggtggggcagccgggcagaggcgatcctcacttctcagagggtagggcggcccagcagaggcgctcctcacttcccacatggtggggcggcaggctagaggcgatcctcacttcccagacggtggtgtggccatgcagaggtgctcctcacttcccagatggtgtggccgccgagctgaggcactcctcacttccctgacagtggggcggctgggcagaggcgctcctcacttcccagacacttggactccgggcagagactctcctcatttcccagatggtggggctgccgggcagaggcgctcctcacttcccagacggttcagaggccgggcagaggcgctctggggagaggataatgttactcccaatatcgcagggggtgcacactccctgtgatattgttccgaatatccagagggggaaaggatgatatagctcccaaaatcgtggggagtgtacacccccctgtgatcttgtttgtaataccaagaagaaaagagaatgctattatttccaatatagcagggggagtacaaccccctgtgatattgttcgtaatatctagggggagagaaaattatattagtcttaatatctcaggggacgttcatccccctgtaatattgttggtaatattcagaatggagaagatgatattgttcttaaaatacaggaaaaaatatgataatattacttccaatatcgaagggggtgtacactctcctgtgatattgttcccaatatccagaatgaaagaggatgctattactcccaatatcccagggagtgtacacccctttgccatattgttcataatatccaggggaagacaggataacattactcccaatatcaccgggggtgtccacccactagtgatatttattgttcatcatatccagaaaaggagaggatgatattactcccaatattgcaggtggtgtacggtccctgtgatattctttgaaatatctagaaaaggagaggatgatatcactccgagtatcacagggggtgtacacccccctgtgatattgttcgtaatatccaggggagaaaaggatgatataattgccaatatttcaggggatgtgcacctccctgtgatattgtttgtaatatccaggggtggagaggatgatattactcaaaataacgtaaacatcctgtgtgtacatcccctgtgatattgtttataatatccaggggggtagaagatgacattacccccaatatcacagagtgtacacacccctgggatactgttcataatatccaggcgggaaagaatgaactacttccaatatcgcaggatatgtacacccccctgtgatatatttcctaatatttatgtgggtaaggatattacccccaatatcacagaaggtgtacatcctctttgtgatattattcctaacatccaggaaaggagagaatgatattactcccagtatcgcagggggtgtacaccacccctgtgatattgttgctaatatccagggggagaggataatattactcccaaaatcacaggggacgtacactcctcctgagatattgttcctaatattcatggggaaaagaatgctactactccaaatacagcagagggtgtacaccatccccgtgatattgttttttatatccaaagggtgaaaggctgatattactcccaatatcgcagggggtgtacaggccccccatgatatcattcttaatatccagggaggcaaagaatgatgttactcccaatattgcaggctgtatacaccccccgtgatattgttcctaatatccagagtaagagaggatgacattgctcccaatattgcaggggttgcacgcacgccctgtgataatattactcccaatatcaacagtgggtgtacactcctcctgtgatattgtttgttatatctaagaaagaagaggatgatattactgtcaatatcacagaaggtgtacagccccttgtgatgttgtttctaatatccagcggtgagaggatggtattactcgcaatattgtagggggtgtccaacggccctgtgatattgtttctcatattcaaaaaggaaaagaataatataactccaaatatcgcagggtgtgtacacttccctgtgatattgatcctaatatccaggaagagagaggatgatattaatcccaatatcacagggggtgtacatcgcttctgtgatattcttcctaatatccagggggggaggggatgctattactcttaaaatcgcagggaacttacactcccactatgatatttttcctaatatccaggaagggagaaaatgatattactcctaatatcacatatcacaatgggtgtacatctccccgtgatattgtttctaatatcaaggatgggagaaaattatattactctcaatatcgcagggggtgtgcacacctcctgtgatattgttcctagtatccagcggaggagatgatattactttaaatattgtagaaggtgtacaacccccctttgatattgttcctaatatccagggggaaaggagatgatattactcctaatatcgcaggggctgtacaaccctatgtgatattgtttcttctaatatccaggggtggagaagataatattactcctaaaatcgaaggggacatacactccccctgtgatatttttcctaatatccagaaggaaagaggatgatattactcctaatattacaagaaatgtatacctgtcctgtgatattgttcctaatatccagaggggtaaatgattatattactcccaatatcgcaggggtgtacaccttccctgagatattgtttctaatatgcagtggaggagaggatggtattactcccaacatcacaggagatgtaaactccccttgtgatattcttcctaatgttcaggacgaaggagggtaatattactcactgtattgcagcagggggtgtagagccccctgtgatattgtttttaatattcaaggttggagaaaataatattccttccaatatcgcatggggtgtacacccttctttttatatagtttctaatatctggggggagaggatgatattactcccaatatcgcagggggattacacccccactgtgatattgtttttaatatccagggtgggagaggataatattactccaaatatcccagggctatacaccctccgtgtgatattgtttctaatatccagaggaagagaagatgatattactcccaatgtcacagggtgtgtacaggccttctttgatattgttcttaatatccatgagggagaggatgatattactcccaatatcgcaaagactgtacaccctttctgtgatattgcttccaatatccagggagggagaggatattacactcaggatcacagggggtgtacaccccaacctgtgatattgtttctaatatctagggaaaatgagggtgatattactatcaatatcacaggaggtgtacactcccttatgatattgttcctaatatccaggagaatgacaggataatattactcccaatatcgcgggtggtgtctccccccactccgtgatattgttcctaatacccagagggggagagaatcatattactcccaatatcgcaggggatgtacacctacatccggcggagtagaagataatattactcacaatatcgcaagaagtgttcaccttccctgttatattgttgctaatatccagggagtgagaagatgatattactttcaatactgagcgtgtacactacccctgtgatattgtttctcatatccagtagaggagaaaatcatgttactcccaatattgcaggggtgaacacctcctttgtgatatttttcctaatatcaggaaagggagagtatgatattacccttaatattgacaggggtgtacacccccctttgatattgttccaatatccaggggggcagaggataatattattcccaatatcgcagagggtgtacaccccccgtgatattgttcctaatatccagagaaataaaaaatagtattatttccaatatcacagggcgtacattttccctgtaattttgttcctaatatctggggggtggggtggcaggataatattactctcaatattggagagggtgtacacccccctgtgatattgttcctaatattcagggtgggagagaatgatgttactcccaatatctcaggagtcgtatacacccccttgtgatattttttctaatatccaggaggcagaggatgatattgctcccaatatcgcagggggtatacacccgagctgtgatattgtttctaatatgcaatatgggggaaggatgattttactttcaatatcgcagggaatgtacactttccttgtgattttgttcctaatatccaggggtggagaagatgctattactatattactcctcatatcgcaggcggtgtacaactccctgtgatatggttcagaatatccagagtgaaaaaggagggtgacattactcccaatatcgggggggtgtacacccctttgtgatgtggttggtaatatccaggggggcagatgagggtgatatcactccccatatcgtggaaggcgtccacttttttgtgatgtggttctttatatcccgaggggagaaggtgatattactccccatatcgcgaagggcatacacccccctgtgatatagctcataatattccggagagtggaggaagatactatgccctatatcgcgggtggcctacaaccccctatggtttggcttataatatccaggggggagagggtaatattgctccccatattgtggagacgtacagccccctgtgatatggtttgtaatatctttggggggcgagggtgatattactccccatatcgcggggagcatacacccccgtgatctggttcatagtatctcaaaggaagaagttgatgtgtacaacttaagggaaaaagttgaagtgaagtgtacacacgccctgtgacgtggttcataatatccaggcgggggagaggagagtgatatttactccccatatcgcgggtgttgtaaactcccctgtgatatagttcataatatccaggggagagaggagggtgatattgctcctcatatcgcgaagggtgtacaaccccctgtgatatggttcataatatccagaagggtagaggacgatgatattactccacatatcttgggaggtgtgatatggttcgtaatatccagcgatgagagaatgatattactccccatatcgcaaaaggtgtgatagggtttgtaatatcctgagggggagagggtgatattaatccctatattgcagaaggactacaccctcccatgacatggtttgtaatatcccagggggtagagtgtgatattactttccatatcacagggggtgtgatatgattcgtaatattcgaagggggagagggtgacactactctccatatcacggggtgtgtgatatggttcttaatatcccaggggttagaggttgatattaccccctttttggggggtgtgtacaccccctgtgatatggttcgtaatatcccgggggagacagggtgacattattccccatatcgaggggatcgtacaccccctgtggtgtggttcataatatccctagggggagatggtgatattactccccatatcagggggcgtgcactcttctgtggtataattagtaatatccagggggcagaggtcgatattcgtttccatatcatgaagggagtacacttccctgtgatatggttcctaatatccaggggggagagggtgatattattccccatattgcggggggacatacaacccctgtgatatggttcataataaccagaaaagaagagggtgatattaatccccgtattgcagagggcatacaccccccctgtgatatggtttgtaatatctaggggaggaaaaggtgatattactttccatattgctgggtgcagacacccctttatgatatggttcataatatccaagttggagagggtgatattacttcccatatcatgggaggtatacccttccctgtgatatggttcgtaatatccagaaggggagagattgatattactccccatattgtggggggcgtacaccttcctgtgatacggtttgtaatatctaggggatatagtgggtgatattactcaccatatcacgggggttgtaacatggtttgtaatatccaggggaggagagggtaatgttactccccatatctcggggcatgtacaccctcctgtgacatggttcgtaatatccaggtcgggagagggtgatattactcctcatattgccgggggtgtgttatggttcataatatcctggggaaggaggctgctatcactctccacatcttgggggatgtacactctcctgtgatatggttcataatatccagggtgggtgagggtaatattactccccatatcgcgggaagtgtacatacccctgtaatattgtttgtaatagaagagagggtgatattactccccacatcgcgggtggtgcccacccccctgtgatatggtttggaatatccagggggatgaggagggtgatattactccccatatctcggtgggagtacatccctctttgatcaagttcataatatccaaaaggaaacaggagagtgatattactccccatatcgccgggggtgtacacgggagggggagtacacccccggcgatatggtctgtaatatccagggaaggagaggagggtgatattactcaccatatcgcaggtggtctacatttacctgtgaaacagtttgtaatatccagggggggaaatgagaatgattttttttttttgagtctcactgtgtcacccaggttggagtgcagtggcacgatcttggctcactgcaacccccgcctcctggactcaagcaattctcctctcccagcctcctgaatagctgggactacaggcgcaccccacaacgtctggctaatttttgtatttttattagagacggggtttcaccatattggccaggctgatctcgaactcctgaccctgtgatccatccgcctcggcctccaaaagtgctgagattacagatgtgagccaccacgcatggcccaaggagaacgatattactccccatatcccagggggtgtatatccccctgtgatatggttcagaatatccggaaggaaagacagggatattacttcccatatcgcaaggggtgtgacatggttcgtaatatcccatgggggagagggtaatattactcttcgtattgtgaagggcatacactcccctgtgatacagttcataatattccggggagtagaggaagatattatgctccatatcgcgggtggcataagccccctgtggtttggttcataatatccagggaggagagggtaatattactccccatattgtggggacgtacaccctcctgtgatatggtttgtaatatcccagaggggagagagtgatattactccccatattgcagggacatacacccccctgtgatatggttcaaaatgtcttttttttttgaaggactggttctttatttcaaaaagacacttgtcaatattcattatcaaaacagttgcactattgatttctctttctcccaatcggccccaagtagaccacatcaaaggagagtacatattaagccaataagctgtaggatgtacacctaacagacctcctagaaaccttaccagaaaatggggacagggtagggaaagaaactttaaaagatcaacaaactgccagcccacggactgcaggggctgtcacagccagatggggtggccagggtgccacaaacccaaagaagcaaagtttcaaaataatataaaatttaaaaagttttgtacataagctattcaagatttctccagcactgactgatacaaagcacaatgagatggcacttgtagagacagcagcttcaaactcagaaaagggtaatgagatgagtttcacatggctaaatcagtggcaaaaacacaatcttctttctttctttctttctttcaaggaggcaagaaaagcaattaagtgctcacctcaacataaggggaacatgatccattctgtaagcagttgggagggggtagagatggaacaaaattttggtctcagaggtcttgccatcttaatttggtcacttctaatgaaaaaaataaaaaatagaaataacattatccaaaggtatcttaaagctgaaaacttgaacagcacattttttgttgttgttgtttggctaactcctcctggaaccacctttctggcttagctagtactttgtacagagcaatgaggcttcccatagtggagtctccctgggctctgtttggctctcagcaaggcaggcctataccttttcctctcctccatggagagaggaatatgcattaaggtgaaaaatcaccttccaaaagtgagaaagggattcgatcgctgcttcagggctgtggtattatatggaatgttttacaaaaggttgctacaaaacaacaaaagaggtaattacaaaatgtgtacatcacaacatactttttaaagacattatgcattgtgctcacattcccttaaatgttgtttccaaaggtgctcagcctctagcccagctggaatctccgggaagaggcggacagtttggtgaaaaagacacagggaaggagcgggcggcggaaggagggggcggcgaaaggagaaagcagccttccagttaaagatcagccctcaattaaaggtcagcttcgggcaggctggcctcaggcggagtctggttcagagggaggagcagcagcagggtgagactgaggcgttctacatctcattcaggtcaagcagagtctggtccagcatcctttgtgtacagaggtgctcccctttggtgcatttcagtttatcttccaagtcatcaattgtcttttccagcttggctaccgatctctcagcaaactcagcatgggtctccgcctcctttattttatcagtaagaatcttgatctcttcctcatatttgtcttctttttgagagtacttttcttcagcagcactcagacacttcaggttctggtccatcagtctaatctgctcatccatctctcggcaaagggattctgccagctcagctcgttcctctgtgcgttccaagtctccttcaatgatcaccaacttacgagccacctcttcatacttcctatctgcctcttctgcaatgtgcttagcttctctgagttggatttcctggagttccatcttttcttcatcttttaaggcccggttttcaataaccttcttacctctctcactctcatcagcagctttttccgcttcttccagcttttgcagggcagtagccaggtgctcctgagcacggtccagctcctcttcaaccagctggatcccacgttcaaggaggccacctcagcctcagcctgttcccgggcccacctttctccctcaacttctcgctggaggcgctcagctcgctcctctgcatcatctgcctgctgctgcagaacctggatcttgcgcttcaccgcctcgatggtggtgatcccagccatggtgcccacccagctactgctagagctccggttcctgcctcctccgatcggcgttgcagcctcctctcacccttacttccgcctcggttcaaaatatcttaagggaaggagttgatattactccccacatcacgggaagtttacatcccctggtgatatggtttgtaatatcccagggtggatagggtgatattactctccatatcgcgaaggagtactcccccctgtgatatggttcataatatccttggggggagagtgtgatattactccccatatcgcgagggccatatactcctttgtgacatggttcgaaatatcccggtgggggagggggtagagggtaatattactccccatacagcgaagagcatacgcccttctgtggcaaggttagtaatacttcagggaaaagagtgcaatattacttttcatattgcagggaacatacactcccctgtgacatggttcgtaatatcccgggggctgagagggtgatatttctccccatatcaccgggggcctacacctgggtgtgatatggctcataatatacagggagggagagggtgatattactccacataccgagtgaggggttacacaccctcgtgacatgttcgaaataccccaaggaggagacaatgatattactttccctgtcgcgggggctacaccctcccagtgatatggttcacaatatcccggggtggagagggtgatattactccctatatcaccggggggtgtacacttccctgggaaatggtttacagtatccccggggggagagggtactattactccccatatcacgttacatatcagggtacacccccacgtgatatggtttgtaacatcccaggaggaagaaaatgatattactccccatatcgcggtggcatacacccctccccgttaaatggttcataatatcttggggtggagagggtgatattactccccatatcacgtggggcatacaccccactatgatatggttcataatatcccggaggggagagggagatattactctccatgtcgcggggggcatatacacccctgtgatatggtttgtgatatcccgggggcggagagggagatattactctccatatcgtggggtcgtacacttttctgtgatatgattcgtaatatccagacggggagagggtgatattacttcccatattgcgggggcgtacacccctctgtgatatggttcataatatcccgaagaaaagagggtgatattactcctcatatcgcggggaacacacaccaccctgtgatatggtttgtaatattcagcgggggagagagtaatattactccctgtatctcggatggcgtacactcccctgtgatatggttcataatatccagaagaaaagagggtgatattactccccatattccagggaatgtacaccaccctttgaatatggttcgtaatatccaggaggggagagggtaatattgctcccaatatcgaaggaggtgttatacggttagtaatatccagagaaggagagggtgacattactccccacatcgtggtgggtgtgcacccacctgtgatatggttcataatattcaggttaagagaggtgatattgctttccatatcgccaagggtgtacactcccgtgaaatacagttcgtaatatccaaaaggggagagggtgatattactcccatatcgtggggggtgtacacccctctgtgatatggttcataatatccagggtggaataaggtggtattactccctgtatctcggggcatgtacatcgcctgtgatatgattcataatatccagaagaagagagggtgatattaatctccatattgctgggggtgtacaaccccctgttgtatggtttgttacactgagttggggagagggttacattactctcaatatcgagtggggcatacacacttatgtgatatggttcataatatcccagggaggagagggtgatattactccccatatcgcgggaggcatacaccccaatgtgatatggtttgtaatatctacatttttttttttgagacgaagtctcgctcttgtcccccaggctggagtatgatggccggatctcggctcactgcaacctcagcctcccgggttcaagcgattctcctgccttggtcccccaagaagttgggattacaggcgcacaccaccacgcccggctactttttgtatttttagtagagaaggggtttcaccatgttggccaggctggtctagaactcctgacctcagatgatccacctgcctcggcctcccaaagtgctgggattacaggcgtgagccactgcacctggcctggtttgtaatatctatgaagggggaaggtgatattactttccatatcacgggaggcgtacaccacgatgtgatatggtttgtaatatccagggggtatactgggtgatattactccccatatcgcggggagtgtatacccttttgtgatatggttcctaatattaagctgaggagaaggtaatattactccccatatcgcaggggtttttatatggttcataatattcaggaagagagagggtgacattactctccatatcacggggtgtgtactcccccatgtgatatggtttgtaatatccagggaaggagaggttaatattactccccatatcgcagggggtgtacacctctctgtggtttgtaatatccaaagggaagaggatgatattatcttcaatatcttggggggatacagtccccagtgatattgttcataatatccagagggggaggggatgatattactcccaatattgcaggtggtgtacaaccccctgtgatattctttataatatagagggggatgatgatattactcccaatatagtaaacaacctgtgtgtacaccccctgtgatattgtttataatatccaagggtggaaaggatgatattactcctcatatcgcagggggtgtatacccctctgtgacattgttcctaatattcaggggaggagaagatgatactactcctcatatcacaggggatgtacacccccctgtgatacttttggtaatatccaggggaggagaaaattatattattccccatgtcacagagggtgtacaccccgctgtgatagtgttcataatatccaggtgaaaagaggatgatattactccgaatatctcaggaagtgtacacccttctgtgatattgttcataatatccaaaggtggagaggaggatactactccccatatcgcagtgggtgtacacccccctgtgatatggttcataatatccaatgtaggagaggatgatattactttccatatcgcggagagtgtacatccccctgttatattgtttgtaatattcagggagaaagaggatactactactccccatatcacacggggtgtatattcccctgtgatatggttcctgatatccaagagatattataatcctctcttggattatgctacctctcatatcgcatggggtgtacacacactttgtgatatcgtttgtcatatccaaggagggagaggattatattaatcccaagatcacggggggtgtacaccctcctgtgatattgtttgtaatattaaggggggagaggataatattactcccaatataattaacaccctgtgtgtactcctccttgtaatattgttcataatatccaatgggggagacgatgatattactttcaatatcgcagaggatgtacatccctttgtaacaatgtttgtaatataaaaggcaagagaggatgatactacttccaaaattgcaggacatgtacaccccccggtgatattgttcctaatatccagtggggaagaggatgatagtagtcccaatatcgcaaagggtgtacacaccccctgggatattgttcctaatataaaaggaggagaggatgctattattcccaatatcacagaaggtgtaaaatcccctgtgatattgttcgtaatattcaggaggggagaggattatattactcccaatatcacagggtgtgtacacagggaggggcaagggccagaagcgggcgggaatccccatgtttgggcggacccagtttctaatggccagcatttgccaatcaaagcttaccagagaactctaaaagccagggctttcctgctagacaagactcatttctggaactgctttaaaaagaaacaaaacttcccaaggaccccttttcctctctgtctgcctaaaataatgttttaaaaactcctaaagcagctgaattcagcccccttcctgggggaatgtatagacggaactcccacctttcccggcatcccaaggccagagtatgtgaaactcctgggtctctatgtgtgtctgagcggctgctctgccaacactccacacagccctgtgtcctggacccaaggcccttatgacctgagctcaagaggggatctcctgatccatgggttgcaaagatccatgggagaagcatggtttctggggcggggtcacacgctcagtcactgtttccctcggatgccggagatggttcctttggctctctgccaatacagggtgaatcatcatccatccctcttttctttgttctcccgggtcaagttgtttgcctagtcagtcccaatgtgagaacctgaatatttcagttgacgcgctgacttcaaaatccccgggcttcgggaggcggagcttgcagtgagccgagatcccgccactgcactccagcctgggcgacagagcgagactccgtctcaaaaaaaaaaaaaaaaaaaaaaaaaaaaaagtccccgggcttttcttttcactcagtggaaggcagctgcttctaattggccatcttggcccgcccccaccacgtgaccttctgtaaaatgcctccactctccaggaacgctctcattatataactttgcctgaaaccaacagcacgctcattgcacatatcatgggctcatttatttcacttataaagaacctggccaaggaagagatagtgcctaaagtggccagtattctgaccgatatgttagaaaaatggtgtgccgaccaattcatgacatgtgtcccaaaactagcaacggaaattgtattcgccgtgttgaggtctctaatccagatgatgctcatctatgtactggaaaaggcagagtcctttcctgacaagctgctgaaactcttcagaaacatctcatatttcctgaagaagatgatgtctggacaagcagcacaggtcgttcagatttaactttctattcatatatccagcacgatattcgcacaattgtcacgaaaccttaccagttgatgagtcctgcacatttcctttaatttcaggaggaagagggtaatccggatgagttttctgacctactctgctgctgtgattaaacaaccaccaggaaattttgacgacactgttctcctgagctcctccctttcctccgggaacaaaacaattgaatttacaaaaataaagtgttatttgactggagtgaggtctcatgtctgcttatgcggtggctcgctgctcagaacagggtgagtctctgggttgtgtgctgaggaggggaggctctcaatctggagaaaacccactgcaggggacacctccatggggtctgagggactgaggatgaggagccggactgggtctagggaaggaggaggtttcagagggtgaaattctggcactaaagcctgggggtgtttgggaacttcctccttccgaagaagtttcagggagggataaagacaaaccctgggctccttgaggggcccttactaatttgagaggactctatcgggaaggagagtgacaatggcctccttgaggactgaggcccctgaataaatgaggcccagatacagtccatgggggatgagaccttcaagggtcacattttggttgggacagaggaaaagtgcagctctgcagccgcagaggaaaacccggcagtgtgaaagcgaccttggaggggccctgtgcgctctgaatgcgtctgagcccccatcccctgtccccgcctctctttctggattcttccagctcggctgtctccgccatcttctgagcgctccaccctgacttattcaagtttcccttctgccttccaagtactccaaaatctttcagatctgtgtccctacccctgtttttagcatgtgttggggctccaggtccctgaaggtttctggcctgaaatccacctccccagcggagtggactgcgttctagagactccacactccgcgaggttcccaggcccctgagggacaaccgagtggcctgcgcacttcagggctccacactcggcaaggtctttcaagcccttggggtccccttcttagttttttccacctttctgggctgcagtcactccataaatgctgggatctgatccccacccccactctcgtttcctcaattctgcgggctacacgctctggcaaggtcctccgggccctggatcccctccctctccctatgcccacgctcctagtcagcccttctggggtccactattttcaggaactaaccgttctcatggagccttgctaaccggaaagctgtgtggaagaaaggctttgaggatagaggtggagatttggctcttccatagtgccactcacccaccccaccatgctgccactgccagacccggacccctgtttcagaacaagtgaccagattcgctcctggacagccctggacactggccttttctctgaaaactactcaccctttctctagtccccacttcatgccagcctcataccctcttccttcccccacgctggcttccgggatcctcctctgctcagacaacctcttctgtgtcccacccccgtttttagaatgctttggggcaccaggttgggggaaggtttctggcctgatatccatctctttccaaactcccttcttcccttgaaaggcttcttgccttcagccccacttctggctccgaggtttcaggacaccctcctcttcatcctcattcttttgaccaccagctttttaggaattcgaacgtccctctcatcttcgtgaatcctgtccaggcatttgttgaccccttcatctgatacccctgacctcacattgccaaaagtctacccctacccagtacactggaattagacaaaatcccaggagttttacctcaactctgagtgtgcccacaggagctctccctgaagccacgtccttttaagcagggtctagggttcctcccttgtcttaatgaactctttgtcacacggaggacgttatggagcccttatgatctttcactgcctttctgcccagcgttttgtctttccatggacatttataatattttccatggacattttgttctctcaatgtccacccctaatttccaacatcccaaagattctcatgtgtttcctgaaagccatttacaggaatggctgtgcccagacccccttccccaggatcctccttcacacctggtaggtgcctctcctagagagatttgcactcagttgtcgtgcagtcacatggcccagatggttgttaatcacccccttcctggcaacagctagcagccagggaatcactggcacagaaacctcagggtgaccaagatgaggccacctctgtgctgaaggctgtgctccagagcctgcttgggatcaggcttaagcaggtcttcagccagacctgatgttacctggtttccttgagctgccctgcctgagctatcgggagcactccctcaatgcacatcttgattccctatctcatgctctgcttctagaaaccatgagctatcaattgctactggcaatggtcctgggaagtcaaccctaagtatggattctggggttggatgactccccacaggacttcagtgagcaacaatcactgctggcagttggaggacagagtcgctagggcatgtgaccactgtgaaaccaccgatgtttcacctggggtaattttggatgaactacggtagaagcactgaaggtacattgcttttggtttggaagattgtaggtaaataatagcgatatgaatgtggaattggatggctgcaaacgagtgccattgatgcattgaaagaggaaaagtcaggctgtcacctgtcactcagcaatttaaagtgtgagagttgggactagatgtggtggctcacatctataatccagagattcgggggaagcttgaagaggtaggatcttttgagtccaggagttccagaccagcctggacaccagagcaagacctcatctctacaacaaaattttcttaaaaattagatgggcttggtggcacgcacctgtacttgtagatctagctaatggggagcatgagataaaaaaatcacctgagtcagggacttaggggttacaatgaggtatgattgtgccagtgcacacactcccacctggccaacagagtgagattctgcttccaaaaaaataagaaataaatcaggtttgagagttggaaagcatcatcttctcctagagccaaaggacatgtacaactgagacccaggaacaaagcttcatcacaaagagaccatcatcagtggagccgggagatgcattccccctcaccctgccttgaggaggcagtggagtcatctgtctgggatcctttctgacccagccctatttgtttgtctctttggcttctttggatttgtatattttagctgttataacactgtaaaacaaacagagtgatttttttgagttgtgtgaatgatgctagctccatagtcaccctgagagtgatgggaacttttgaatttgtggcaagttggagggtagtgtaagtgacctgagattgccaaattggggctagcactggatgtgaggttaggctagtggaaaaatatgcccagaaccagaggagtgtgggctcactgcaggtggttaggctcagatccaaattgtacagatggatagctttggggtaaagaataacatagttgagaagtgcatgtgttagtctgttcatgcactgctataaagaattacctgagactgggtaattatttataaaactcaggtttaattgggtcatggttccacaggctgtacaaaaagtatgatgctggccatcagctcaacttctggggaggccccagaatagttagagtcatggcaaaaagtacaagggaagcaggctcatcttccacggccagagctggagcaagtggtaggagaggtgatacacactttcaaacaagtaggtcttttgagaactccatcaccggacagcacctatgggatggtgctaaattattcatgaaatatccgcctccataatccactcaactgtcaccagcgcagccagccccacctccaacagtggggattacaattccatatgaggtgtgggtggggacacagctccaacctcaatcagtgggcatcctggattgggtctactatagaaggagaaccaggagctgactatgatcttgaaccctacccatgatggccgggcggggtgactcatgcctgtaaccccagcactttgggaggctgaggtgggtggatcgcctgaagtcaggagttagagaccagcctggccaacatggtgaaaacctgtctctactaaaaatacaaaaaattagaccggcgttgtgctggatgcctgtaatcacaccactacgctccagcatgggaaaaaataccaaaacttcgtctcaaaaaaaaaaaaaaaaaaaaaaaaaaaaagactgcccatgaccactgcaccagtgagagggacaccagcatcactgagatgcaagggctggacattcttcataggtcagagctcaaagcaggggacactgatacagagatgggctccatccatagcaccaaagtggtgagaggatgtgggaatggcagaggccagcactttgccatcaatgcaagggggtataaggaggtgacaccagtgccagagtacatcacggggggactgccctacaatatctaggacttacctcttagagcgtgtttcattagcgacaacagatataaatggcagacaggtgtgtccctgcattaacaggaaatagaaatcatcaagaggaacagaaggcagatgtcagcagccccttagaaagtcatcatccttcatacagttaaaatctgagacagttctcacacgagaaggcctaactcaaaaagaggctgggttctcatgaggcaggtttatgcaaaaccaaggaaggtgtacaagtttggaattctccagtttcccttggaaaagacctacagtcatttgcttaggtaactgagcactgaacaaaggtgagtattgttgtcttttagaagctcttggccaagaaggccttgttggcataaaacccatggtttggaaacatcaccatgacccctgttagagtaatggcctaagggtgggggtcaggaaattgatgtattccttgccaacttctgcctctaagtgagtgaactctgtttgtgaacctctctcctctgtggttatgttcctaggctctcatgtataatcaggagtcatagacttagaaacaggaaaaatacttacagtgtttttgtggcctgtgagctatgacttataattttaggaaaaaaacaattgcaaatggaaagcctaagtctatcaatgctcatccaagacaacataatcaataaaaaccaatatcaaatctcaaggcaaattatttcctgtatatagatggcagagatgagcaccaccatcaaaaactcaaggaccagtgctgtgggtccagtcatctgtttcatggaattcaccagtctggtatcttcaaaatccagaaggatgatggcagatggcaggaaagtaatgcaaacgtcatcaggtgtgaccccactgtagcagctgtgatggatgttttctctcaccatagcaataaataacacaacctcggtcacactgtatgcattgttggtctgcaaaatccatgttttgcaaaactcttcaggaaggtggatctgtaatattggcattgacatgagaacaacagcagtatttattcacaatctcaagctctctgtcttcccgtctctctcattagccatccaagtagtcctgaggaaccaagcccatcagaacattctgcaacataatacacagctccattctccattcaaattttgttgttgttgttgttgttgatgagacaacatcttactccatcagccaggctgacgtacagtggggctatctgggctgactgtagtcttgagcttccaggctcaaggcatcctctcacctcagcctcctaagtggcttgaactacagacacacagcgacatgctgggctagtttttgtatattttgtagagacgtgctctcaccatgttattcaggctggactcaaactcctgagcgtaagtgatccaagcaccttggcctcaaagtgctgagattacaagcctgagccactgcacccagcccaatctccattctactgataacaatgtcattaccaggtctgatggacaggaaatggtaaggtttctgaaaacctaaggatcacacagcgagttccaaaggctgaaagtgcatacctgtcgacactgataccaatgacatccaatggtgagaatgacattccttgtagtcctagctctgctcataacaaatctatactgaagtgtaagagtttgatggtcatggggattttccatgtctctgcctttcagcgatgtgccatatctgtgaagtgttcagaaatgcaacagcctgaggcatgctgggcatatcctctaataaaaaggaaaatgccattttatggtcctgtatttctacaagttggaacacatgggcctgtgatccagatgggggaaatgggaatattcccactcattcaccttcatccacgaagcccatttgaaagctttgggcttcccatccttgtagattttagtgttgtgggctgggtgcagtggctttcacctgtactgccaacactttgggaggcctagacaggtgaatccactgaggccaaaagttcgagaccagcctggccaagatggtgaaaccccgtccctactaaaaatacaaaaattagcaaggtattggggccagcacctgtaatcccagctgctcgggaggctgaggctggagaatcgcttgaacccaaaaggcagagactgcagtgacccgatcctgcctttgcactccacctgggcaagcagaacaaaacttctgtcttgaaaaaaaaaacaaaaaacgaacaaaaaagatgttagagttctgggtttagaggtctataccccagaaagagaatggtttcaacaagggacaaagaagttgctttaaacgttgacttgccatttcttttcagtgtgtttgttctcttgcgtcaagagaccaccagaaaagtggtgcaattactctcctgtcaagaatcattgactatcatctgcaagagggtcagatcctggtatataattagggcagaaatacttagtctgagaagggtatgacatccagaggccctattaatgatgtccttttctccatgcctgactctgaccccatgtgctggactgcccctgtgtggatggcctcatggcctgctcggactctgaggtcccaccccaagtggcacctccatggagggctctactcttgtatgggctctgacactcacactgagacactctcccatggacacctcttcacccacttggggtctgaaactgggctactccatccctccctaacctggaacagagagctttcactgctattacacaagtcatagaggctaactcctcatttttccaagctaattattgaaacattagtcctgggttgataagacaagataagttaacttttcataaatttgcttatcaagttttgaataaattcaaataaattcaccttccccacacaccttagttgtcgacatcacacgcgcacccatactcacagggtgagcacgaaggcttcactgtcagtggagaaagtggcaaaacccttctgtgcctcatcctggtctagacctggccctcatcctttcccactcttcccctcactcccttggattcatccacactggcctcctgcctgctgctccacctccctgcgaagctcacccctgcctcagggcctttgcacgtgcagtggcttcaagccatatcctcttcacccagatctcccagatctcctgaatgatcttcttttatcattcaggtctcagcttgcatgtaatcttctcagtgaggattacccaaaccacatagttcattcattcattcaaatattcattcaatggcatattgacaaagcagctacttcatgccaggccttgggccaggtgttatggatatggcaacaaacaaaacaagagttttctgctctcaaatttttacccacttaaaggagatatcatacatcatctgtaaataaatacatcatctgtaaataatgatgtaaataaatacatcatctgtaaatctgtaaataatgatgtaaataaatacatcatctgtaaataaataaagtataataaaagaaaatagtaggtttttttggttggaggtgaccgtgaagtttgcaaataccatcttacaacacattattttattttatttcatttcatttttaattttattattattatactttaagttttagggtacatgtgcacaacgtgcagatttgttacatatgtatacatgtgtgaagttggtgtgctgcacccattaactcgtcatttagcattaggtatatctcctaatgctatccttcccccctcccccaccccacaacagtccccggtgtgtgatgttccccttcctgtgtccatgtgttctcattgttcagttcccccctatgagtgagaacatgcggtatttggttttttgtccttgtgatagtttgctgagaatgatggtttccagcttcatccatgtccctacaaaggacacgaactcatcattttttatggctgcatagtattccatggtgtatatgtgccacattttcttcatccagtctatcattgttggatatttgggttggttccaagtctttgctattgtgaagagtgccgcaataaacatacgtgtgcgtgtgtctttatagcagcatgatttataatcctttgggtatatacccagtaatgggatggctgggtcaaatggtatttctagctctagatcactgaggaatcgccacactgacttccacagtggttgaactagtttacagtcccaccaacagtgtaaaagtgttcctatttctccacatcctctccagcacctgttgtttcctgactttttaatgatcgccattctaactggtgtgagatggtatctcactgtggctttgatttgcatttctctgatggccagtgatgatgagcatttcttcatgtgttttttggctgcataaatgtcttcttttgagaaatgtctgttcatatccttcacccactttttgatggggttgtttgtttttttcttgtaaatttgtttgagttcattgtagattctggatattagccctttgtcagatgagtaggttgtgaaaattttctcccattctgcaggttacctgttcactctgatggtagtttcttttgctgtgcagaagctctttagtttaattagatcccatttgtcaattttggcttttgttgccattgcttttggtgttttagacatgaagtccttgcccgtgcctatgacctgaatggaaatgcctgggttttcttctagggtttttatggtttgaggtctaacatgtaagtctttaatccatcttgaattaatttttgtataaggtgtaaggaagggatccagtttcacctttctacatatggctagcctgttttcccagaaccatttattaaatagggaatcctttccccacttcttgtttttgtcaggtgtgtcaaagatcagatagttgtagatatgtgacattatttctgaggactctgttctgttgcattggtctatatctctgttttggtaccagtaccatgctgttttggttactgtagccttgtagtatagtttgaagtcaggtagcatgatgcctccagctttgctcttttggcttaggattgactttgcaatgcggggtcttttttggttccatgtgaactttaaagtagttttttccaattctgtgaagaaagtcattggtagcttgatggggatggcattgaatctataaattaccttgggcagtatggccattttcacgatattgattcttcctacccatgagcatggaatgttcttccatttgtttgtatcctcttttatttcattgagcagtggttttagttctccttgaagaggtccttcacatcccttgtaagttgggttcctaggtattttattccctttgaagcaattgtgaatgggagttcactcatgatttggctctctgtttgtctgttattggtgtataagaatgcttgtgatttttgtacattgattttgtatcctgagactttgctgaagttgcttatcagcttaaggagattttgggctgagacaatgggttttctagatatacaatcatgtcgtctgcaaacagggacaatttgacttcctcttttcctaattgaataccctttatttccttctcctgcctaattgccctggccagaacttccaacactatgttgaataggagtggtgagagagggcatccctgtcttgtgccagttttcaaagggaatgcttccagtttttgcccattcagtatgatattggctgtgggtttgtcatagatagctcttattattttgagatatgtcccatcaatacctaattattgagagttttcagcatgaagggttgttgaattttgtcaaaggccttttctgcatctattgagataatcatgtggtttttgtctttgggtctgtttatatgctggattacatttattgatttgcatatattgaaccagccttgcatcccagggatgaagcccacttgatcatggtggataagctttttgatgtgctgctggattcggtttgccagtattttactgaggacttttgcatcaatgttcatcaaggatattggtctaaaattctcttttttggttgtgtctctgcctggctttggtatcaggatgatgctggcctcataaaatgagttagggaggattccctctttttctattgattggaatagtttcaggaggaatggtaccagttcctccttgtacctctggtagaattgggctgtgaatccatctggtcctggactgtttttggttggtaagctattgattattgccacaatttcagatcctgttattgctctattcagagattcaacttcttcctggtttagtcttgggaaggtgtatgtgtccaggaatttatccatttcttctagattttctagtttatttgcgtagaggtgtttgtagtattctctgatggtagtttgtatttctgtgggatcagtggtgatatcacctttatcattttttattgcatctatttgattcttctctctttttttctttattagtcttgctaccggtctatcaattttgttgatccttttaaaaaaccagctcctggattcattaattttttgaagggttttttgtgtctctatttccttcagttctgctctgattttagttatttcttgccttctgctagcttttgaatgtgtttgctcttgcttttctagttcttttaattgtgatgttagggtgtcaattttggatctttcctgctttctcttgtgggcatttagtgttataaatttccctctacacactgctttgaatgtgtcccagagattgtggtatgttgtgtcttttttctcgttggtttcaaagaacatctttatttctgccttcattttgttatgtacccagtagtcattcaggagcaggttgttcagtttccatgtagttgagcggttttgagtgagtttcttaatcctgagttctagtttgattgcactgtggtctgagagacagtttgttataatttctgttcttttacatttgctgaggagagctttacttccaagtatgtggtcaattttggaataggtgtggtgtgatgctgaaaaaaatgtatattctgttgatttggggtggagagttctgtagatgtctattaggtccgcttggtgcagagctgagttcaaatcctgggtatccttgttaactttctgtctcattgatctgtctaatgttgacagtggggtgttaaagtctcccattattattgtgtgggagtctaagtctctttgtaggtcactcaggacttgctttatgaatctgggtgctcctgtattgggtgcatatatatttaggatagttagctcttcttgttgaattgatccctttaccattatgtaatggccttttttgtctcttacgatatttgttggtttaaagcctgttttatcagagactaggattgcaacacctgcctttttttgttttccattttcttggtagatcttcctccatccctttattttgagcttatgtgtgtctctgcacgtgagatgggtttcctgaatacagcacactgatgggtcttgactctttatccaatttgccagtctgtgtcttttaattggagcatttagcccatttacatttaaggttaatattgttatgtgtgaatttgatcctgtcgttatgatgttagctggttattttgctcattggttgatgcggtttcttcctagccttgatggtctttacaatttggcatgtttttgcagtggctggtactgactgttcctttccatgtttagcgcttccttcaggagctcttttagggcaggtctggtggtgacaaaatccctcagcatttgcttgtctgtaaaggattttatttctccttcacttatgaagcttagtttggctggatatgaaattctgggttgaaaattcttttctttaagaatgttgaatattggcccccactgtcttctggcttctagagtttctgccaagagatcagccgttagtctgatgggcttccctttgtgggtaacccgacctttctctctggctgcccttaacattttttccttcatttcaactttggtgaatctgacaattatgtgtcttggagttgctcttcttgaggagtatctttgtggcattctctgtatttcctgaatttgaatgttggcctgccttgctaggttgcagaagttctcctgggtaatatcctgaagagtgttttccagcttggttccattctccccatcactttcaggtacactaatcaaacgtagatttaatcttttcacatagttccatatttcttggaggctttgtttgtttctttttactctctttcctctaaacttctcttctcacttcatttcattaatttgatcttcattcacttatatactttcttccacttcatcaaatcggctactgaaggtattgcatgcatcatgtagttctcatgccatggttttcagctctatcaggtcatttaaggtcttctgtacattgttttctctacttagccattcgtctaatcttttttcaaggtttttagcttccttgtgatgggtttgaacatcccctttagctcagagatgtttgttattactgaccttctgaagcctgcttctgtcaacttgtcaaagtcattctccatccagctttgttccattgctggtgaggagctgcgatcctttggaggagaagaggtgctctggtttatagaattttcagcttttctgctctggtttctccccatctttgtggttttatctacctttggtctttgataatggtgacctagagatggggttttggtgtggatgtcctttttgttgatgttgatgctgttcctttctgtttgttagttttccttcgaacagtcaggttcctcagctgcaggtctgttggagtttgccggaggtccactccagaccctgtttgcctgggtatcaccagcggaggctgcagaatagcaaatattgcacaacagcaaatattgctgcctgatccttcctctggaagcttcgtctcaaaggggtgcctggctgtatgaggtgtcagttggcccctactgggaggtgtctcccagttaggctagatgggggttagggacccacttgagaaggcagcctgtccattcacagagctcaaacactatgctaggagagccactgctctcttcagtgctgtcagatggggatgtttaagtctgcagaaatttctgctgccttttattcagctatgccctgcccctacagatggagtctacagaggcaggcaggcctcattgagctgcggtgggctcctcccagttcgagcttccagaccactttgtttacctactgaagcctcagaaatggtgaacacccctcccccacccagtctgccgccttgcagttccatctcagactgctgtgctagcagtgagcgaggctccatgggcgtgggacccactgagccaggcacaggatataatctcctggtgtgccatttgctaagaccattggaaaagcacagtattaaggtgggagtgtcccaattttcccagtacagtctgtcacgggttccctcatctaggaaaggtaaatcccctaaccccttgtgcttcccggtgacgcaatgccccaccctgcttcagctagccctccatgggctgcatccactgtccaaccagcccaatgagatgaacaaggtacctcagttggaaatgcagaaatcacccatcttctgtgtggatcaggctgggagctgcagaccggagttgctcctattcggccatcttggaatggcaatctatgtttgctttttacatttgaaaaaactggtgtcacgtacctaggtattaatcattgtggtatcctcttgccgatttacctctttatcattaactagtgaccctccttgtcttttgttgttacagtctgtgattttagtctattttatctaatatgagaatagctactctggcacttttttggtttccagcttcatgaaatatccttttccatttccctgttttcatttccctttcggtgtctctatagatgaagttgatttctttaaggcaccataagttgggtcttatttctttatccatttgaccatttagagaatttagaacactgtcagtgttattattcataagtaaaaacttaagagtgggtgtagtggtgtacatctgtatttcctgcactttgagagactgaggcgagctgatctcctggggtcaggagtttgagaccggcctggtcaacatgatgaaaccctgtctctactaaaaatacaaaaattagccaagcatgctggcatgtgcctgtaatccaatttacttgggaggctgaggcaggagaagcttgaacctgggagacaaatgttgcagtgagctgagatcacacagagaagtcatctccactctcctcatcagaacctcttgttcacagcatttgtgagcacaaatcaatgatggttattctttcctactaattagggatattttattacacagcaatagcctccagcaaagggaaccatcatacatgattcctacaagttgacagggctggaattatcactgaaaaactaaggtggctatacttgattcccaatgtccaatttttcatgaatagagaaatttatcctttttccccccagccagaaaccaagttttgctcttacgcccaggctggaatcaagtggcacaatctcagctcactgcaacctctgccccccagcttcaagaaattcaccttttgaacaaggagatattaaggatacactatgtgtatgctaccggtggttgcaggagactcagaaaagagagaaacagtcactggcctcgtgcaactgatattctcgggaggagagaaaggcaatcaagaaagaaacatgctgtatttcagacagctgtaagtcctccacaagaaaagaaagcaggtgaggaacataggaaatgtgtcaaccataaggttcccgctaattctataagttggtcagggatatcctccaagaataagcagcatctgagcaatcacctgaagggaggaaggaaggaagactgtgagtggtggcttacacctgtaatcccagcactttgggaggccaaggagggcagattgcctgagctcaggagttcacgaccactcagagcaacctgttgatacccaatctctactaaaaacacacaaaaaaattacccgggtgtggtggcacgcacctgtagtcccagcttccatgcccagctgatttctctctctccatatatatatatatatacacatatattgtttttgcagagatagggtctcactgtgtcacccagtcatcaagcaattctcttatactgttttggaaaagcatgggaattacaggtgtgaaataccctgctggtcctgaaaaatgtgatatttgggattctctgcctggcttgttttacccaaaataatgacctccagttccttccaggttgctgcaaaagacatgattttcactgttttataactgaatagtattcctgtatgtatacataccacattttctttatttattcttctgttgattgacatgtagggtgattccatgtctttgctactgtaaataatgctgcagcaaatatttgtgtgcattttgatctattcctttgagtaggtacccagtactgcaactgcaggactgagtagttgttatattttttgttctttcagaaatctccatagtgtttgccataaaatctgcactaatttacattcccaacaacaatgcataagatttccccttttctccacattctcactaacatttgttatgtttttgtctttttcataatacccattctgactggagtaagatatctcattgtggtggttgttgatatttttgagacggggtctcactctgttgccagactggagtgcagtggtgtgatcgtggcttgctgcaacctccacctcccgggttcaagcaattctcctgcctcagcctcccgagtagctgggactacaggcgcgtgccaacaggcctggctcattttttgtatttttagtaaagacagggtttcaccatgttggccaggatgatcacagtctcttgagctcatcatacacctgcctcagcctcccaaagtgttggaattacagtcatgaggcagcgcacccaacctcaatgtggttttaatgaccatttctctgacgattcatggtgtggagaatttctttgaaataccttttggccatttatatgtgctcttttaaaaactgactcctgtccaggtgcggttgagcatgcctgtaaccccagaacttcgggaggctgaggccaatggatcacttgaggcaaagaggcagaaatcagcctggccaacaaggcaaaaccccatctttactaaaaatacaaaaaatcagccacgggctgtgactcgtgcctgtggtgcaagttactcaggaggttaaggcacaggaattgcttgaacccggtaggcacaggtcacagtgagccaagatcatggcactgcactacagcatgggtaatagagaaagacctgtctcataaaaacaaatgaataaataaataagataaaaaataaaaaagtctctttatgtcctttgccgactttttaatgggattctttggagttttctgttgtagttgagatctttgtttactctcggtattagtcttttgtcaaaggaaaagtttacaaataatttcttccgttctgcagtttgtctgctcactctgttgagaggattatttctttggctgtgcagcagctttttgtttcagtaaagcttttgaatttatataattaaaattttcagtttggtttaaatttgcactggtcgatttttggttttgttgcctgtacttttgaagtcatactcttgaactctttactagacaataaccagaagagttttctctagttttcttctcacatttttattatttcagtacatatatttaagtctataattcatcttcaattgatttttgtagaaatagtgagaaataggagtccaggtttattcttctgcaaatgacaattcaattgttccagcaccaattattgaaaagggtgtgctttcctcaacgtatattcttatcagctttgtcaaagatcagttggctataaatgtgtggctttctttctgggctctctagtctgttacatcaatctgtgtgtctatctgtatactactaccatgctgtattggtgatgatggctttgtaatataatttgaagtcaagaaatgtgatgctcccagctttgtttatttgcttcagaaaggctgagtcaacagctgcagagatgaagctgcccctcctcgcagggctccttcccggaaaaagatcatggctcccactgaccatataaccatggctggaactcctgaaattcccaaagggaggccctacccagtgaggggggatgaatgaaggtcctacttaaggaatctgtctggccacaatcaggcacagcagctgtgctgccttgtgggggaccagaccacctggattccctggagcctgcaggctagaatgtctgagtccatggaaacacagaaatggaggccgccctcacctccccagaaaactgtagtctcaggcagtctccagccgattgccactggttggctgctattccaagccagtgggtcttaacttgagaggtgctgtggaagtggggcccacggaatgaggctgcttggctccctggattcagccccttttctaagggaatgtacagatggaactcccgccttgcccagctttccaagtatataaaactcctgagtctctgtgagtgtctgagcgagtgctctggcaacattcgacacggctctgtgtatctgacccaagacccttatggcatgagctaatgggaggatcttctgatccatgcgtggcaaagatgcatgggagaaacatggtttgtgggtaggggttgtgcattcactactgcttctcttggctgtaggtgaaggtttctttggctctgtgctgatactgggtgcaccatcacccaccccctttgtttcttctcctgggtcaagtcatttgcctaatcagtcccaatgtaggaacctggatacttcagttcaaggtgctgaattcaccgtgcttttcattcaggggaagacagctgcttctcattgggcatcttggcctgcccacttcacgtcactttttgtaaaatccacaccactccaggaatatccattacttaacttcgcctgaaataaacagaaggctcattacacttatcatgggctcacttacttcgcctataatgaaggtgccatggaaatgctagtggatgacgtggtccattttcttagggatgagatagaaaaatggtgtatggctttttaatttaattaaaatttttagtttggtttaaatttacattggtctctttttggttttgttgcctgtacttttgaagtcttactcgtgaactctttactggacaatgaccagaagagttttccctaagtttcttctgatattttgaccatttcagtacatacatttcagtctataattcactttaaattgatttttgtaaacatggtaagaaataggagttcagatttattcttccgcatatgataatgcaactgtcccagtaccaattattgaaaagggtgtgctttccctagtgtatattcttgtcagctttgtcaaagatcagttgcctatgaatgtgtggctttcattttggattctctcgtctgttacatcaatctgtgtgtccacatttatacctgtaccatgctgtattggtgactatggctgtgtaatatattttagagttaggaaatgtgatgctcccagctttgttcatttgcttcagctgaaaaggttgagtccacaattacaaagatggcagccgcccatccccggaggacctccaacccagaaagagatcaggcttcccaccaaccctataaccctggctggagttcctgaaattccaacagggaggaccttcccagtgaggagggatgaatcaaggtcaaatttaaagaaacagtctggccactatcaggcacagcagcagtgctgccttgtgggggacccctcctgctccagaccagctgccctccctggagcccgaaggctagattgtctgagtctacggaaacagagacggtggccgccccaaccacccagaactcggtagtctcaggcacttggcttgctatcttgccactgcttggctggtattccaagcccgtgggacttgagaagtgctgtgatgatggggaccacaggatgaggctgtctggctccctgtgatatggctgtgatgagtggaggaacaccagggctcatgtctcacacagaattggagaaaatgacacaaacacatgtacagtggttttatggcgtgcagtttaataggcaagaacgaaggaagagctccccatactgagacagagggaggggggctccaaagccaaaagaggaaacccggagtgctgtggataccaatgagttatatgaagaaactggagggggcggtgtctgatttgcatagggttcaggcgattggttcgaccaggcatgtcatttatgtggcccacggaaaaactggccctcccacctagcctttgaatatgcacgtgccggacaccctgatttcctacactcatggggatatatgggggtggccatatcgccaggcacaggtggggacaagggccagaagagggcgggaatcgctatgtttgggtggacccagtttctaatggccggcatctgcagatcaaggttaccggagaactctaaaagccggggctttcctgctagacaagactcatttctggagctgctttaaaaagaaacaaaacttcccaaggaccccttttcctccctgtctgcccaaaataatttcttaacaactcgtataacacctgaattcagcccccttactgggggaatgtaccaacggaactcccacctttcctggtttctcaaggctagattgtgtaaacctcctgggtctcggtctgtgtctgagcagctgctctgccaacactccacacagccctgtgtactaggcccaaggccgccgtgactcagcccatgggaggatctcctgatttcttggttgcaaagatccatgggagaaaaatggtttctggggcggggtcacacactcatggcttctcttggctgtgcaagaaggttcctttggctctgttccaatatagcgtggttcatcacccacccctgttttctttgttctcctgagtcaagttgtttgcctagtcagtcccaatgtgagaacctgaatatttcagttcacgtgcttatcgtgaaattcactgagactttaattcagtggaaggcagcctcttctaattggccatcttggcccgccccctccacgtcacctcccataaaatggccacgctctccagggacgatgccattatatatctttacgtgaaaccgacagaacacttattacactttttgtgagctcatttacttcacttataatgaacatggccatggaaatgctagtggagaaagtggtcgattttctgatggatgtgataaaaaaatggtttgccgaccaattaatgacatatgtctcaaaactagtaacgagacccttaatcgctgggttgaagtttctaatcaagaagatgctcatctatgtattcaacaaagcagcttcccttgcttctgaaatgcttccaaacaacatctcatatttcctgaagaagataatgcctggacaagcagcacaagtcattcaggtttactttcagctcataaatccagcaggatattcgcacaattgttgggaaaccttatcagttcatgagtcgtgcatgtttcctttaatttcaggaggaagagggtaatctggaagagtttcctgacctactctgctgctgtgattaaacaaccaccaggaaattttgatgacactgttctcctgagctcctccctttcctcggggaagaaaagcattgaaactacaaaaataaagtgttatttggctggagtgaggtctcatgtctgcttatgcggtggctcgctgctcagaacagggtgagtctctgagttgtacgctgaggaggggaggctgtcaatctagaaaaaacccattgcatgggacacctccatggggtctggggggctgaggatgaggagctggactggatctagggaaggaggaggtttcagagggtgaaattctggcagtaaatcctgggggtgtttgaaaacttcctccctcagaaggagaagactcagggaggaataaggacaaaccatgggtcccttgaggggcatttactaacttaagaggactttatcgggaagcagagtgacaatggcctccttgaggactgaggcccctggataaatgaggcccagatccagatccagtccatgggagatgagaccttcaagggacatatttttgttgggacagaggaaaagtgcagctctgcagctgcagaggaagccttggcagtgtgaaagcgaccttggagggggccctgtgcgttctgaatgcttctgaggtccatcccctgtccccgcctctttttctggattttttgggctccatggtctccgccatcttctgagcgctccacgctgccaccttcagttttctcttctgggctccaaatactccaaaatctttcatatctgtgcccctacccctgtttttagcatgtgttgggactccaggtccctgaaggtttctggcctgaaatccacctccccagcggtgtggattctgctctagagaccccgcacttggcaaggttcccaggcccctgggggacaaccgagtggtatgtgcacttcagggctccacactcggcaaggtctttcaagcccttggggttccctcctcagttttcttcacatgtctgggatgtagtcactctataaatgccgggatgtgatccccaccccagtgattttttttagttccatgagtgttgctatctgaatagtcatcctgagagtgatgggaccttttgaatttgcagcaagttttagattagtgtgagtggcctgagatcgcaaaactggggctagcattggatgtgaggttaggctggtggaaaaatttgcccagaacctgaggagtgtgggctcactgcaggtggttaggatcagcacagaattgcaaggatgtatagctttggggtaaagaataacatggttcagaagtacatgtattagtcttttcatgcattgctataaagaattacctgagactgggtaattaattataaaaactcaggtttaattggctcatggttccacaggctgtacaaaaaggatgatgctggccatcagctcaacttctggggaggcgtcagaaaacttagagtcatggcaaaaagcacaagggaatcaggctcatcctccatggccagagctggagctagtggtaggagaggtgctgcacacttttgaacaatcagatctttttagaactctatcaccagacagcacctagaggatggtgctaaattattcatgaaatatccacccatatgatccactcaattctcaccggcccaaccaggaccacctccaccattggggattacaattacacatgagatgtgggtggggacacagatccaaactcgatcagtgggcatcttggactgggtctactatagaagaagaaccaggagctgactatcatccttaagactgcccatgatggccaggcagggtggctcatgcctgtaatcccagcactttgggaagccaaggtgggtgaatcccctgaggtcaggagtttgagaccagcctcgccaacatggtgaaaccctgcctctactaaaaacacaaaaaattagatgggtgttgtgccagacgcctgtaatcacagctactccagaggctgaggcatgagaattgcttgaacctgggaggcggaggtggcggtgagccccaatcgcactgctacactccagcatgggcaacaataccaaaacatcgtctcaaaaaaaaaaaaaaaaaaaaaaaaggctgcccatgaccactgccccagtgagagggacaccagcatggctaagatcaagtgctggacattcttcatgggtcagacattaaagcaggccacactgttacagagatgggctccattcatagcaacaaagtggtgagaagatgtgggaatggcagaggccagcactttgccatcaatgcaaggtgggcataaggagctggcaccagtgccagagtgcatcaggggaggactgctttgcaatatctagcacttacctcttagagtatgtttcattagggacaacagatataaatggcagacaagtgagtcccttcagtaacaggaaatagaaatcatcaagaggaacagaaacagatgtcagcagccctcatataaagtcatcatccttcatccagttaaaacctgagacagttctcacataagaaggtctaattcaaaaagagactgggttctcatgaggcaggttcatgcaaaaccaagggaagtatacaactttgggattctccagcttcccttggaaaagacctacaatcatttgcttaggtaactgagcactgaacaaaggtgagtattgttatctttcagaagctgttggccatgaaggtcttgctggcataaaacccatggttggaaacatcaccatgacccctgttagagtaatggcctaagggcaagggtcaggaaattgatgtattccttgccaacttctgcgagacgagtgttggtccactcatctctttcacggaattcaccagtctggtatcttcaaaatccagaaggatgatggcagatggcaggaaactaatgcaaacaccatcagttgtacctccactgtagcagcagtaatggatgttatctcttcattgtaatatccagggagggagaagatgacattattctcaatattctaaacaccctgtgtgtacagcctctgtgatattttttgtaatatccgtgtgggagagaattatattactcctaatatctcaggggttgtgccccctctgtgacaatgttcctaacacccaggaggggataggatgatatcacttttagcatcacagggggtgtacaccccactgtaatattgttcataatatccgggggggagagaatgatattactcccaatatcgcaaagactgtacaccaacctgtgatattatttgtaatatccataagaggaagaataatattactcccaatgtcacaggaagtgtacacccttctgtgatattgttcaaaagatccagttagggaggggatgatattactctcaatatcttaaacaccctgtaggtaagccctctgtgatattcctcataatatccagagggagaggatgatattactcccaatattgcatgaagtctacaccccacctgtgatattgttcctaatatccaggatgggagaggatgatattactcccaatgtcgcaggggatgtacaccttccctgtaatattgttcgtaatatctagaaaaggagaggataatattactttcaacatcgcagggggtgtacaccttccttgttatattgttgctaatatccagggaaaaagaagatgacattaccaccactattgcagaaggtgtacacccccccttgatatagttcctaatatccagaaaaggagaggagatattactccaaatattgcaagaggtgtacattcccctgtaatatttttcctaacattcaggaagaaagagagtgatattgcccttaatattgaagggagtgtgccccccccgtgatattgtttctaatatccaagaaatgaaaggatgatattactcccaatatcacaggggctgtacagccccctcccatgatattgttcccaacatcggggggggggtgaaatagtattattcccagtatcacaataggtgtacacacctgtcgtgatattgttcctaatacccatgggggaaaggacgatattattcttaatatctcagagggatgtacaccctccctgtgatattgttcctaatatccggggtgggagaggatgatattacccccaaaatctcaaagggtgtacacccctcttgtgatattgttcctaatatccagggtggagaggataatattattcccaatatccaggaaaggaaacgatgatgttactgtgaatattccagggggtgtcctcccctctgtgatattgttcctaatatccaggttggggagattatgatatttctccaaatatcacaaggggtgtacaccaaccctgtgttattgttcctaatatcgatggggggagaggacgatattactcccaatatcacagggggtgtacaccacctttatgatattgttcctaatatccatgaagaaagaggatgatattactttcaatatcgcaggggatgtacactccccctgtgatattgttagtaatacctaggagaagaaagtgtgatattactcccaatatcgcaggggatgtacacgcttcctgtgatattgttcctaatatttagggggaaaggggatgatattactcccaatatcgaatggtgtgtacacccccccgtgattctttttttttttttttttttttttttgagatggagtcttgctctgccgcccagactggcgtgcaatggcgcaatctcggctcactgcaacatttgcctcccaggttcgcacgattctcctgcctcagccttcggagtagctgggattataggcagctgtcaccataccaggctaatttttgtatttttagtagagttggggtttcaccatgttggtcaggctggtcttgaattcctgacctcaaataatccacccaccttggcctcccaaagtcctgggattacaggcataactttccctgtgatattcttcctaatattcaggaagaaagaggatgatattgctcccaatatcgcagagagtgtgcactcctcctgtgatatggttcttaatattcagaggaggagaggatgatattactttctatattgcagaaggtgtacacctccctcgtgatgtctttcctaatatccagtgggggagaggttattagtctcaaaatcacagaaggtgtaaacccccatttgatattgttcctaatattcaggggtggggagagaaaggtattactcctagtatttcagggcatgaacacccccaccgtgatatcattcctaatatccagaaggggaggcaatgatatttctcctaatatcacaaagggtgtacaccccttctgtgatattgtaaatattctgtgtgtacacccccctgtgttatagtctgtaatatccgggtgggggagagggtgatatttctccccatattgtaggggatgtacacccttctgtgatatggttcgttatatccagggaagaaaaaggtaatattgctgcccatattgtggagagtgtacacccccatgtaatatggttcgtaatatccaggagtggagagggtgatactgctccttacatcgaggaaggtgtacaccttattgttatatgattcgcaatatccaggggaggagagagtgatattgctccccatgtcgcagggggtgtaaaccctccgtgatatgattggtaatatccaggaaaggaaagggtgatatttctccccatatcgcgggggacgtacatcctcctgtgatatggttcgtaatatccaggaggaaagaggaaaatattgctcttcataacccgaggggtgtacaacccctgtgatatggttcgtaatacccagaagtgtacacccctctgtgatatggtttgtaatatccagggggttagagggtgatattgctccccatatcgcagtgggggtacacccccctggattggttcataatattcatggggggagaaatttacatttatcctcatatcagggggggtgtacaccccccgtgatatggttcgtaatatccaggggaagaaagggtgatattgctccttatatcgcggaaggatcaccctcccctgtgatatggttcataatacccagacgggaagagggtgatattgttcttcataaagcgaagggtgtacagccccctgtgatatggttcataatatgcaaaaggggagagggtgatattgctccccatatcacggagggtgtactcccttctttgatatggttcgtaatatccaggggtgtagatggtgatatagctcgccctattggggagggtgttcacccctctgtgatattgttcgtaatgtccagggaaagagaggatgatattactcccaatatcgcagaaggtttacaccactctgtgatattgttcataatatccagggaaggagaagacgatattactcccaatatggcagggggtgtagaactcctgtgatattgtttgtaatatccaggcaaggagaggatattactctcaatatcgcagaaggtttacacccctatgtgatactgttcatgatatccagggaaaaagaggatattactccctatatcacaaagggtgtacacccctttgtgatattttttgtaatatccaggggagagaggataatattactctcaatatcagaaggggtgaaaaccctcctgtgtcattgttcataatatttagggaaggagagagtgatattactccaaatatcacagtgggtgtacacccccctatgatattgttcctaatttccagaaggggagatatgatattattgccaatatcgcagaaggtgtacaccttactctgacattgtttgtaatatccagatggggaaatgatgatattactcctaatatcacagggggtgtacacccccttgttttattgtttgtaatattcaggggaagagacgattatattactcccaatatcgcagggtgtgtacaacactctatgatattgttcataatatccaggggaggagaggaagtgtacacccccccgtgatattgttcgtaatatccagaggtagagaggatgatattactcccaatattgcaggtggtgtacacctttctgtgatattgtcatgatattaagaaggggagaggatgatattactaacaatatcacaaaaactgtacactccctgtgatattgttcataatatccagaagaagggaggatgatattattctgaatctcgcagaagatatacaccaccctgtgatatggttcataatatcctaggggaaagaggatgacataactgtcaatatcgcagggggtgtacaattccctgtgatattgttcacaatattcagagggaaaaaggataatattactttcaatatcgcaggcggtgtacacattactgtgttattgtttataatatccggaatgagagaaaattttctcccaatatcacaggaggtgtacactcccctgtgatattgttcgtaatatccagggaggggagaggatactattactcccaacatctcagggagtgtaggccccccctttgatattgttcctaatattcggaagtggagaagatgatattacttccaaaatcgcagggggtgtacactccctctgtaatattgtttctaatattcatgagtggaaagaaagatattactcccagtattgcaggggacatacaccacactgtgatcttgttcacaatattcgggggggagaggatgatattactcccaatatcaaagtaggtgtacacccccttctgatattgatcgtaatatccagaattaaagatgataacgttactcccaatattgcagggggtgtacatttttgaatactgttcataatattaagagggggaggggatgatatctgtcccaatatcgcaaagtgtgtacacctcctgtgacattgtcccaaatatccagaggaaaaaaggatgttattactcttaatatctcagagagtgtacacctccctgtgatattgtttgtaacatccagaagaaagaggctgatattactcttaatatcgcagggggtgtacacccccgccccgggatattattcgtaatatccagggggaagtggaatgttcagaatgggagaggatgatattacttgcaatatcatagtgggtgtacaccccactgtgatattgtttgtaatatccgggaaaggagaaaatgacattcctccccatatggcaggggctgtacaccacctatcatattgttcaaaatatccagaaggggagaggatatgtctccaagtatcacagggggtgtacaccccgctgtaatattcttcctaatatccagggtgtgagaggataatagtactcccaatatcccagggcatgtacaccccccttgtgatgttgttcctaaaattcatggggagaaagaatattactcccaatatcacagggggtgtacatacactctgtaatattgttgccaatatgcagcaggagagaggatgatattactcccaatatcacaggggctgtacaccccgctgggatattgtttctaatatcaagggggaaaaaggatgatattactcccaatgtcgcagggtgtgtacttcctctttgtgacattgttcctaatatccaggagagaagagggtgacattccttccaaaactgaaaggggtgtacacaccctttgagatattgtctttaatatccagaacgaaacaggatgatataactcctaatactgcaggggggtacaccctctctgtgatactgtttctaatatccaggaggggaaagaaaaatattaatcccaatatcacagggggtgtacattccccctttaatattgttcctaatatccaggaagacacaggatgatactatttccagcagcacagggcatgtacacccctttgtgatattgttcctaatatccaggaaaagagaggatgatattactgtcaatattgcagggcgtatacactggttctgtgatattgtttctaatatccgggggtggagaaaatgatattactcccaatattccagcgggtgtacacccgttctatgatattgttcctaatatctgggggagagagaatgatattattgtcaatatcacaggggatgtacagattccctgtgatattgtttctaatattcacagggggagaagggtataatactcccgatatcgcagggggtgtacactccccctgtgaagttgttcctaatatccagggattgagagaatgatattactcccaatatcacaggcggtgtaaaccccctgtgtgatattgttcctaacatccagaggaaaagatgatgatattattttcaatatcacagggggtgtacgcatccctgtgatattgtttctaatatccaggggaggagaggatgatattattgttaatatcgcagggggtgtaccccaccctgtgatactgttcctaatatccggggtggaagaggataatattgctcccaatatcgcaaagggtgtacaaccttcctgagatattggtcctaatatccagggagggagaggatgatattactttcaatatcacagggagtttacacaacccctgcgatattgttcctaatatccagcggaagaagagttaggataatactattttcaaaattgctgggtctgtaccccctccccgtgatattgtttctaatatccaggaggggagaaagtaatatgactcccaatatcttagaagatgtacaccctccccataatattatttcttacatccagggggtagaggatgattttgctttcaatatcacagagggagtaaacctttccggtgatattgtttttaatatttaaaaagagagaagataaaattactcccaatacaaaggggatgtattgtgtactcccccctctgatattcttttttaatatccagatggagagaggatgatattactttcaatattgcatgggatgtataaatcccctgtgttattgttctgaatatacaggtggggagagtatgatattactccaaatatcgcagggggttctttccccctgtgatattgttcctaacattcagggagggagaggatgatattactcttaatattgcagggggtgtacccacgcctatgatattgttcctaatatccagagggggagaggatgatctaactcagaatatgacaaggggtgtacacacagcctgtgatatggttcctaatatacaggggagaaggggataatatttctcccaatatcgcagggggtgtacaaccccctgtgatactgttcctaatatacagaaggggacagcatgatattgttcctaatatcgcaggaggtgtacaacgccctgtgatattgttcctaatatccagggcgggagaggatgatattaccctcaatatcgcagggggtgtgcactttccctgttatattgttcctatgatccgggtggggggaaatgacattagtcccaatatcgcaggatgtgtgcaccgctcccccgtgatattgttcctaatatcaagggggagagaggaggatattactcccaatatcgcaagggatgtacatcctccatgcgatattgttcgtaatattcaggaggagagaggatgatattactcttaatatcgcagaaagtggacacccaccctgtgatgttcttcataatatccagggaagcagacgattatatgactttcaatatcgctgggagtgtacatcccttttgggatattgtttctaatatccaggaagggagaggattatattactctcagtattgcaggcagtgtacaccttttttgtgatattgttcctaatattcagaaagggaaaggatgatattactcccaatattgcaggtggtgtatatccccctctgatattgttccttatatcaaggaagagaaagaataatattactcccaatatcaaagacagtgtagacccctcctgtgatattgtatttaatatccatggggaaagaggatgatgttactcccaatatcgcagggggtttacacccacactgtgatattattcctaaaatccagtggaggagaaaataatattgctcccaatattgcagggtgtatacaggccctcccccgttatattgctcctaatatccagcggtggagaggatattactttcaatttgtgtagggagtgtatacccccctgtgatatttttctaatatcaaggatgggaaaggatgacattactcccaatatcgcaggaggtgtacacgccctgtgatattgttcctaatatctagggaaggagaggatgatattactttcaatattgcaggagctgtacaccctctgtggtattgttcttaatatttaggttgggagaaaatgatatgagtccaaatatcgcagaaggcatacacacttccaataacattgttcttaatatccgggggagagggtgatattactcccaaaatctctggggggtgtacacccccttctgatatttttcctaatatccagggaaggaaacgatgatattactataaatattccaaggagtgtacaccttcctaatatcctaatattgttcctaatatccaggggtgggagaggattatattactcccgatatcgcagtgggtgtacacccctcctgtgatattgtttctaatatccaagctaggagaaaatgatatcactctcaataccacagggggtgtacaccttccgcatcatattgttcctaatattcagagggaaagaagatgaagttactttcaatatcggaggggttgtacacaacccctgtgatattgctgctagtatccaggaagaaaggggattatgttactccccttatagcagggggtatacacctcccctgtaatattgttcctaatatcaaggctgggatatacgtggggggaaggatgatattactcccaatatcgcaggggttatacaaccttctgtgatattgctcctagtaaccagggcagaagaagatgatattactcctaatatcgcaggaggtgtacactcccccattatgttgttcccaatatgcagaaaaggagaggatgacattattgccagtatcgcagggtgtgtacaccacccctgtaatattgttccaaatatttagggggagagaggatgatattactcccaacatcgcagggggtgtacacacatcccctgtaatatagttcttaaaatctaggggaaaaggggatcttatttctctaaatattgcagagggtgtacactccccggtgatattgttcctaatagccgggagggagataattaaattactttcaatatctcagagagtgtacatcgcccttgcgatattgttcctaatatccagagcaaaagagaatgatattactcccaatatcttaggagtgtacatttaacctgtaatattgttcctaatatccagggggaagagaatagtattactgccaatatcgtaggggttgtacaccttttctgtgatattgttgcaaatatttagtagagggaaagaatattactcgcaatatcacagggaatgtatacttcccctgtgatattgttctgatatccagaaaaagagagggtaatattactcccaatattgcagggggtgtacaccccccttgtgatattgatcctaatataaaggaaggaagaggatattactcctcatatagaaggggttgtccaccccccttgtgatattattcctaatattcagggaagcagaggatgatattattttcaatatcacagagggtgtgcagtccacctgtgatattgttcttaatattcggggggagaggatgttattatgcctgatatcgcagtagaggtacacccctcaagtgatactgttcctaataaccaggggtgaagaggatgatattactcccaatatcgcaggtggtgtacacccccccatgatggtttctaatatacagagggggagaggaaaatattactcccaaaatcgctggaggtctacaccccccttgtgatattgttcctaatatccaggaaaggaaacgatgatattactgtgaatattccagggggtgtacacccgctttgtaatattgttcctcatatccagggtgtggagaggattatattactcccagtatcgcagggggtgcacgacgcccctgtgatattgtttttcatatccaggaggggagattattatcaatatggcaaggggtgaacaccccctgtgatattgtacttaatagttaggttggcagaaaatgatattagtctcgatatcgcagggggtgtgcactccgcctggtgatattgcttttaatatcaagggggagaaaatggcattactcccaatatcgcagggggtgtacaccgctcatgtgatattgttcctaatatccaggtggagagaacataatattactcccaatatcgcacaaggtgtacacccctcctgtgatatggttcctaatatccatgggaggagatgatgatattactcccaatatcacaggggatgtacaccacccttgtgatattgttcctaatatccagggaagaaaacgatgatattattgtgaatattacagggagtgtacacactccctgtgatattgtttttgatatacagggtgggagaggatgatattactcccaatatcacataaggtgtacaccccccgtgatattgttctaaatatttcggtggggagaaaatgatattagtctccatatcacagggggtgtgtgctcctcaggtgatattgtttttaatatcaagagggggaggagattatattactttcattatcacagggggtgtacacccctcctgtgatattgttccttatatccaggcgaggggaaaataatattactctcaatatcgcaggaggtgtacacaccccatgtgatattgttcctaatattaagggggaaagaagataatattactttcaatatcacagggtttgtactcctttcttgtgatatagtttttagtatccagggggaaagagcatgatattactcccattgtagcaaggggtgtacacacctcctgtgatattgttcctaatatccagaagtggtgaggatgatattactcccaatatcgcagggggtatacaccccacctatgatattatttctaatatccatgggaaaagagtatgatattacacccaatgtcgcagagggtgtgtatttttcctgtgatattgtttctaatattcaggcggggagaagatgatattactctcaatatagcagaaattgtacatccccgctgtgatattcttcataataatcagggaaaaagaggatgatattactaccaatattgcaggggggttacacttcccctatggtagtgttcctaatatccaggaagaaagaggatgatattaatcccattatccaggaagtgtacacccaccctgtcatgttgttcctaatatccagcagggaagaggatgatattacaccccccccccgtgatattctccttaatatccaggaggggagaggctgatattactggatatatagcaggggtgttcataccttctgtgatattgttcctaatatccagaaaaggagaggatgatattacttccaatatcgcagaaggtgtacacctccctgtgatattgatcctgacattcagaaggggagaggatgatattactcaaaataccgcagggcatgtgcattcccttgtgatattgttcctaatacccagaagggaacaggataatattactttcaatatcgcagggagtgcacacccccctttggtatggttcttaatatccagaaggaaagagggtgctattactttccatattgcaaggggtgtacaccccactgtggtatggttcataatatccaggcagggagagggtgctattactccccacagtgcggggcatgtacaccctgctgcggtacggttcctaatatccagggggagagaggatgctatgactccctatatcgcggggtgtgtacacccctgtgtggtatgttttgtattctccaggaacggagagggtgttgttacccctcatatcgctggaaatgtacactcccctgtggtatggttcgtaatatccaggggattgagggtactgttacccccatactccccatatcgtggggggagtgcacctccctgtggtatggttcgaaatatccagggtaagagagggtgctattattccccattttgcaggaggcgtacacccccctatggtatggttcgtaatatccggggtgaggggatgctatcaaaagaagagagaaagagaccccccatattgttctatattattttatactcagtacctgttttaagaagaaacaaggaagtgaaaccaaaagcaggcagcccggcgccaggcaccagacccaaaaccagacccgaaaccaggcctgggcctgcctgaccttagcctgatagttaaaattcaacccatgacctagcaaccaatgttatccatagattccagacattgtatggaaggacattgtgaaatttcttgttctgtgctgtttcactctgattaccggtgcctgcagcccctgtcacatacccactagattgctcaatcaatcatggccctttcatgtaagatctttagtgttgtgagcccttaaaaaggacagaaattgtgcactcaacaagctcggattttgagacgctagtctttcgatgcttccagctgattaaaagccacttccttcactacctcggtgtctgtggggttttgtccgcgactcctcctgctacactatgactccccatatcaaggggggtgtacacccccctgtggttcgtaatatccagcaggggaaaaggtgctattactccccatattgcagggagtgtacacccccttgtagtatggatcgtaaaatcaaggggggagggaaggtgtaattatccccatatctcagggggtgtacacccctttgtggtaaagtttgtaatatccagggatattacagggatattatccccaaattaatacttttataatttcttatgcctgcctttactgcaatctctgaacataaattgtgaagatttcatggacatttatcacttccccaatcaatacttttataatttcctatgcctgtctttactttaatctcttaatctcatcatctttgtgagctgaggatgtatgtcgcctcaggaccctgtgatgattgcattaactccacaaattgtttataaaacatgtgtatttgaacaatatgaaatctgggcaccctgaaaaagaacaggataagagcgatgttcagcgaacaagggagataagcataaggtctgactgcctgtggggctgggcagaacagagtcacatttttcttattgcagaaaatgagtaggagaaatatcactgggaagggaacgcattcctaggggaggcctatggacggccgctctgggggtgtatcccttatgtggttgaagataagggatgaaatacaccctggtcccctgcagtgccctcaggcttgctaggattagaaattccagcctggcgaattctagtcagaccagttctctgctcttgaaccccgtttcctgttaagatgtttatcaatgacaatgcgtgcacagcaggacatggaacctcaatagtaattccattttctccctggccttgtgaccttgctaggcccttctgcccttgtgatcttttattgccatttgaagcatgtgatctctgtgacccactccctattcgtatccccctccccttttgaagtccctaataaaaacttgctggttttgcagatcaggtggtcatcacagaacctgccgatatgtgatgtcaccccggaggctcagctgtaaaatttctctttcgtactctttcactttatttctcagaccaggtgacacttaaggaaaatagaaaagaacctactttgaaatattgggggctagttcccccaatagacattgttcctaatatccagaaaaaaagaagatgatattactcccaatatcacaggggttgtgaaccccacctgtgatatggttcctaatatccaggaagggagagaatgatattactctccatattgcagggggtgtgcacatccctgtgatattgttcctaatatccaggggaggagagggtgatattactcccaatattgcaagggttgtaaactccaccctgtaatattgctcctaatatttaggatttagggggggagaggataatattactcccaatatcgcaggggatgtatatgccctctttgatattgttcctaatatccagggggggagaggataatattactttccatatcacaaagagtgttcacccccctgtgatattgttcctaatatccaaaaaggaagaggatgatatcaatcccaatatcacaggaagtgtacaccccccccttttatattgtttctaatatccaggggaaatgagggtgatatttctctcaatatagcagaatgggtacactccccctgggatattattcctaatatccaggggaaaaaaagaggttgatattcttcccagtatagcagggaatgaatacaccctttgtgatattgcttctaatatcaaggggaaaagaggatgatatgactcccaatatcacaggggatgtaaacctgtggcgttgttgctaatatcaaggagggaagagtatgatattactcctaatgtcgccgaaggtgcacactttccctgtgatattgttcctaatatccaaaagggaagagaatgatattacccccagtattgcagggtgtacaccacccctgtgatattgctcctaatacccaggaaaaaagagaatgctattacccccaatatctaaggggacgtataccttccctgtgatattgtttctaatatccaagtggggagaggatggttttactctcaatattgcagggagtgtacactccccctgtgatactgtttctaatactcgggctgggagaaatagtattactcccaatatcgcagtgatattgtttccctgtgatattgtttctaatatctagtgggggagataattatattactaccccatacacaggggagggtgtacattcccctgtgatattgtttgtaatatccagggaaggagaggatgttactcccaatatcacaggggttgtacaccccttttttgatattgttcctaatatctggggggcagagaattatattactgtcaatatcacagagtgtgtacaccccctctgttatattactctttatattcagggcggtagaggatgatattactccctatatcacagggggtgttcacccctcctgtgatattgtttataatatctaaggggaaagaggatgatatcactctcaatatcaaaggaaatgtacacctttcctgtgatattgtttttattatataggggggcagaggatgatattaagaacaataccacaggggatgtacacccacgtattgatattgtccctaatatgtatggggaaagaggacagtgtaactcccgatatcgcagagtgtgtacacccccttgtgatattgtttctgatatacacggggagaaaagataatatttcttccaaaattgcagggggtgtacaaccccctgtgatattgtttttaatatccagtgggggagagaatattactcccaatattgcagggcgtgtacacaacccctgtgatattgttcctaatatccagagtaggggaggatgacattactttcaatatcgcaaggggtgtacattcccctgtgatattgctcctaatatccatgaggggagaggatgatattattcctaatatggcaggggctgtacaccttccctgtgatattgtttctaacatccagtgggggagaaaatgatattactccctatatcacagaaggtgtacactttccctgtgatattgttcctaatatccagaaggggagaggataatattactcccaatatcgcaggaagcttacaactcccctgtgatattgtttctaatatccagggaggtagggatgatattactcccaatatcgcaggggatgtacactcccccgtgacattgtttctaataaccagggggtgagaggatgatattacgcttaataccgaagggggtgtacacacccttgtgatattgtgcctaatagccagggggaagaaaattatattaattttaatatttatggggaaaaaggatgatattactcccaatatcacaggggctgtacaccgaccttttgatattgtttttaatatccagaagagaagaggataatattgctcccaatatcagaaaaggtgtaaaccccttctgtgatattggtcctaatatccagggagggagagaataatattactaccaatatcacagaaggtgcccacccccaaggtgatattgctcctaatatccaaagataatagggtgatgttactcccaatatcacaggaggtgttcacaccccttgtgatattgtttctaacgtacagggaagggagaggatgatattattcccaatatcacaggaggtgtatactcctctgtgatattgattttaatattcggggggaaaggatgatattactccctatatcgcagagggtgtacaccctctgtaatattgatcctaatatccagggcgggataggatgatattactcccaatatcgcagaaagtctacacaacccccagtaatattgtttttactatccagggggaagaggatgacattactcccaatttcacagagtgtgtacactcaccatttgatattgtttctaatatctagggggagagaatatattactcccaatatcacaggaattgtacaccacctctgtgacattcttgtgaatatccggggaaaaagagaataatattactcccaatattgcagagcgtgtacacccctccatgatatcgatactaatatttttttaaagaggatgatattactcccattgtcacaggatgtgtacaccccccttgtgaaattgttcataatattctggggggagagcataatattactccccatatcgaaaaaggtgtccaccctccttataatatggttcctaatatccaggatattacttaatccaggatacttgtaataccctaaatatacaattgcttgaacctccacctcccaggttcaagcaattcttctgcctcagcctcccgagtagctgggactacaggggcacaccaccacacccagctaatttttttttcttgtatttttagtagagatggggttttgccatattggccaggctggtctcaaactcctgaccttgtgatctgcccacctcagcctcccaaagtgctgggattataggcgtgacccaccgtgccaagccaggaagaggatgctctatagatttccccaataagagatggctttgcagggccattccaaaatatgtcaaagaaatacatttggggataaaatactttgatttcctttagggaatgttatctattatgtgatgctataccagagtcaggttggagtcggttatcttattgcaacaaagagtctgttccgtcactgttgggatctctattttttcctcttatttcttgagacagggtctcactctgtcacccagtctggagtgcagtggtgcgatcttcattcactgaaacctctgcctcctgtgttcaggtgattctcgtgcctcagccccttaagtaactaggattacaggtgtgcgccaccacacccagctaatttttgtattttcagtagagatggtattttgccctgttggccaggctggtcttgaactcctggcctcgtgtcatctgcccacctcgacctcccaaagtgctgggactgcaaatgtgagctattgtgcccagccaggatctctgttttaatgttagtgctggtcactttgcatgaactccaaagggaagaaatataatgaggtgtgtctgaccccctgccttctcatcgtgacctgaattagtttttcaggtttgcaggggatacccttggacaagaaggggctctattcggttggttggggggattagaattttactttttgtttacaatatttctcctgaaagagttaggggctcacaaggaatttccgcgtgagcaacttatgaggaaagccatctgggaagatatgtgtccttgtgtcactgggatattctcgtttaccccaatgatacggcaatgacgcagggttgtgaaattacagctatgtgtttggggaaaaaagaaagcaggattgtgtgactacgtttccaaacttcacttgcccttagccatagtgagttgggggcctggagattctgttttctttcacaatgatatagatacaattaaatgtatagaaagcaaaaaaataaaaaggtgagtaatgaggaacctctgattcctgagtggccatgtagttacccatggcacagagccacagttactgaaggtaaagtttgctggggaatttagaaatgaatccagctcttggaggagtcagtttactggatgcctaagaaaatgcaaacaaaataagaaaaaagggtaatattcaatcccatagttattgttacctgtcatagctaaagtaaaattaaaacagagtgctggcttcaatcttgatgctacactaagcttagatttcagtgaatgtgagtctcagccactagctcagagccacctcccaaagaccaaatcatgtagggacaatagaaagtacttctgagaattgtggttaccaagaacctagtaactgttggggaggagcaaaacaaagtacagaaaccagagggtacaatctgagtgagactgctatcagcttctggaggagcctttactaaaatgaatgatgagagtaactggatgatgagagtaactaatggatgatgagagtaagcaatgtctttggttttcttttttttttttttttttttttagcagacgtctcactcttgtcgcccaggctggagtgtaatggcatgatctcgcctcactgcaacctccacctcctgggttcaagcaattctcctgtctcagcctcccgagtagctgggactacaggcactcatcaccacacctggctaatttttgtatttttagtattttctggtgagggtccaggtttccggaaacaactcagagacatatgttaagatgttatctttagttttcacagggaaccaaatatgttacgactccaatttccttggctattgttttaagttaccattaccttctcgttgatcaagttgctcatttacttctcaagcctagctagatgcctggaatttcccttgaaggaagtcaagattttcctttatctccatactggctgatggtgatcgagtaagcccctaagaggggtccctgctccatctcgagatgctgctagattctacagtgcctaataaacagctctcgcctggccgacaaagagctgcttgctctctggatagcaattccaaagtgaacagacaacatcctgtttggaagactgccactctgttagaagaagcatcaggaaaacctttcttttgagctatttataactaacagcaattgaccaagtatacttttgtgagtgaaactgacctttctccctgtaagaattctccaaaatttggaaactatttgtgagtatttttacttatggcaatataattattggcacaagctcaatcagattcggttttctttcgtaacaggaaccattggagatactcattactctttgaaggcttacagtggaatgaattcaaatacgacttatttgaggaattgaagttgactttatggagctgataagaatcttcttggagaaaaaaagactgggtatattttcaatatgctttccttttaaggtccctcacctgtggaaagtaaagaatgtcactttctgacaggctcaggaacctcaagttatgtagggatctcaagaagatgggggaattcacccagttcatacaggtgaaattgctgttgcaaagattatgaatatgagagaagtccagcatggctgacttcatctcgtgtctggcctcaggctggctgcccttgctcactcttgggcataggccaagctagccatgggaggaatttagtttatagtttaactttgaagcacggatgataatagtctctccctaaaatgaaccccttccttgctcagggactgaaactacctttgtatgacaaatgaaagcccacaagattaagattatgagaggggcctgaattctgctaaaatgcaggtgtagctgactgataacaagtcattgtcccacagcttgcctttctataatctcttgcttctcaggagtcacatggccagaggtcctgagatttccagtcctgtgacccccacccagagatggacttagtgcatgaggaccattttccacacccctatgatttcatcctcaaacaatcagcagcaaccattccctagccccctgccttccaaattatccataaaaatcctagcctctgagttattagggagattgattaataatcccagtcctaccccttgggttgctctgatttaattaaaccttctctactgcaataccacggactcagtaaattggttttgtctgtgcaatgggcaagaagaacatgttgcatggttatacaggtactacaagcacagtctgatggcaaattattggttttgcttcctgcccttgatgtttctaaacatctagtccaaaattacttgtgaaaggtccagcaaagccaattttaaaagaggctatatggccaatcactattctttctacacattattgcaaataatcaggccacggctgggcacggtggctcatgcctgcaatcccagcactttgggaggctgaggcaggatcacctgaaatcaggagttcaagaccagcctaggcaacatgataaaaccctgtctctactaaaaatacaaaattagccaggcatggtggcatgcacctgtaatcccagctacttgggagactgagggaggagaatcacttgaacctgggaggcagagattgcagtgagctgagatcacaccactgcactccagcctgggcaatagagtgagactttgtctcaaataataataataataatcagaccaagtataatgaaattaaaatttattttgcaaataaattggtcctactacaatttatccttcatagaaatgtggaaactgaagataaaaaaaattaggtttcagaagaaaactatactacacctgttattagattctagccctaaacattgtttttgaggtttttattatttacctgcaatttggtctaaattctgaattatttcctgactacaagtatccaaggaataaatgggttttctttttctttatgatagttttagttggcttctaatgcaacaacaatttttattgtaatcctgtgtgcattctattcctactattcaaattattaatgttatagatctttcattgtagtacttctgaattaaccaaaatcacagtattctgaagatgattctacaaagcctgctgtttctacaaaggctgctgatgatttctacaaagcctgctgtagtgttgctgtggcctctgcttaaaaaagtagaaaacacattgatgcagcatgttcaccccaacctccctgcctaaaggctcagggaccatcttggaagaggaaggcgcgtgagattgtaagagccgaattagggggatggagtgtggagaataaggacacttcatcttggatgctcacctgccaaattgacttctgatgaaagccagctccagaaatgtgcctacagttactactttcacctaaaccctgcccttagtcaaatccttctcttcttctaagcaatcaacttcaattccttgtataacccacagtataaaagggcttttataccattctatcctattgcatgtaagccttgggtctgggaggtaacagtgtgggattccaccatctcatctccctgccacccaaacatgcctgctcttctttaagcaatattaaatgtttgtacttcagaaatttgatttgtcagcctcttcttcagactctcagcttctttggcctttgggagtaaatttgcataggcctgctcaaaacaggatgttctgggggtttgggggtgttgttttgttttgttttttgttttgtttagagacagggtctcactctgtcacccaggttggagtgcagtggtgcaatcatggcacactgcagcctcaaactcctaggctcaagcaatccccccaccttggcctcccaaagttctgggattacaagcataagccaccatgcccagccctggacttttctttaaagacatttacacagtgtaggaattactgtgggtgcactgctcaggtccccttctccaggatgctcattcctacctcatagatgattttcctgcagagatttgacctcagctgaagggcagtcacctggtccaggtggttgctattcacctccttcctgagaacagccaacagccagggacacgctagcacagagatataagagcgaccaaggtgaggccccttctgtgctgcggtgcatgctccagagcctccctgggatcagacttaagagggtctccagccagatctggtcttcgctgctttcctcgagctccccagcgcactcctgcaatgcatcttttttttttttttttttttttttgagacggagtttcactcttgttgcccaggctggaatgcaatggcgcaatctcagctcaccacaacctctgcctcgcgggttcaagtgattctccttcctcagcctcccaagtacctgggattacaggcatgcaccaccacgcccagctaattttgtatttttagtagaaacgggtttctccatgttggtcaggctggtttcgaactcctgacctcagttgatcctcctgcctcagccttccaaagtgctgggattacaggtgtgagccactgtgcctggcccaatgcacctcttgaatcacctcctcatgctttgcttttagagaacatgatccccaacatgtgattccagcaaagattctagaaagccaaccgtgacaatcacttctgggtttagatgacccccccccaccacaagatggcagtgagcacctcatcacagaggtgctgatggtctgcagcaccgcgccaggccagaacgtgccttttacagaagaaaataacccagtagctgactaggatggtgaggagggctggtgagcactgcggtagtgagagggacactagcatcactgagatgcaagtgatggtcatttttcataggtcaaagctcaaagcaggggacagttacagggcagggcttcatagcaccagtgtgatgaaagtatctgggagtggctaaggccagcactatgccatgggaagcaaggtgggcctgaggaggaggcagcagcgtcagcctgcaacaagtgggggctgccctgcagagacctaagagtcatgttatagagcacagtgtctgtaaggccaagaagtgtggacagccaagtgtgtcaattactagacatactcaagaggagcaggaagggcagggcatggtggctcatgcctgtaatcccagctacttgggagactgaggaaggagaatcgcttgaacccgggaggtgaaaattgcaatgagccgagatttcgccactgcactccagcctgtgtgatgggagcgggactccatctcaaaacaaaaaaagaaaaaggaaaaagaaaaaaagaaaaacctaggtatacttctcaagcaaataaaaataatcaaaaccaatatcatgcccgggcacaaatttcatatatataacagatttaaatatatgagggtgattatcctctcatatctccatttttttttgtttttccatttttttctttactaaaaaaagttaatgccaatgacacacaatttttttttttttttttttttttgagatggagtctcacttcttcgccctggctggagtgcaatggcgtgatctcgactcactgcaaagtctgcctcctgggttcaagcaattctcctgcctcagcctcccaagtagctgggaccacaggagtgagccaccacacccagctaatttttgtatttttaatagagacggggtttcaccatattggccaggctggtctcaaactcctgatctcaaataatctgcccgcctcggcctcccaagattctgggattataggcgttgagccactgcgccccgcctatgtatgattttttttttaattttattttcataagtttttggggaacaggtggtattttgttacatgagtaatttctttagttgtgatttgtgagattttggttcacccatcaactgagaagtatacactgaacccaatttgtggtcttttatccctcacccccttcccaccctttcccccggagtccctgaagtccattgtatcattcttatgcctttgcatcttcatagcttagctcttgaacccttactttctgtttgagggagaagacatatcatctacaagtagatactgtgtaaacattccattgcatgactatcccataacttatttattatttgtgtttggttatttgctgctatgtaacaaccccactcccaactaaatggtgtgacaattccatgattctgtggatcaaaaattctgaaaagtcaaacccaaggagttttgtctctgctccatgatgctaaagcctccgcaggggtgaggcgaatggctcagggtgactgaaaagctcagggttggaacagctggggatgaggcctctatgtataagatgattcttcactcacaggtctgaaactatggtggggacagccagaaggctcggctcagctgggacagtcacctgagccctacacatgacctctccaacatggtgatcctgaagcagttgggtttcttacacagcatcacacttttcttttttttttttttttttgagatgaaatattgctctatcacccaggctggagtgcagtggcacgatctcagctcactgcagcctccgcctaccaggttcaagcgattctcctgctccagcctcccaagttgctgggattgcaggcgcctgccaccaagcccagctaatttttgtatttttagtagagacggggtttcaccttgttggccaggctagtcttgacctcttgacctcaggcgatccgcctgcctcggcctcccaaagtgctgggattacaggcatgagccaccgcgcccggccaaagctcacacttcttatgattcagccttagatgtcacatcagttcattttccccacacttattagtgttagaagtcacaagcccacccatactcaggggactggcacacagaccccactctcaatggaaggggtgggacaccaccattcctgctgatgggcatttgggtaacttcctgtttgaagctattaagattgggctgctgtggccgggcgcagtggctcacgcctctaatcccagcactttgggaggccgaggcgggcggatcacgaagtcaggagatcgagaccatcctggctaacacggtgaaaccccgtctttactaaaaataccaaaaaaaaaaaaaattagctgggcatggtagcgggcgcctgtagtcccagctactcgggaggctgaggcaggagaacggcgtgaacccgggaggcggagcttgcagtgagccgagattgtgccactgcactccagcctaggcgacagagcaagactccgtctccaaaaaaaaaaaaaaagattgggctgctgtgactattctagtaggtgtctttggtgagcgcctacacgtgtttctctttttctctttagtatatgcccaggaggggaactgctggctcccagataccgtatgttcagggtcacacacacttccacagggttttccaaagcccttgtaccagcacgcactcccagcacctgtgtgactgctccagctgtcccacagtctcatcagttctattgctgatattttcattttagcttaagttatatttaataggaaaattaccgttgcctctgccccccgttcctgcctgtaggagtttctcgtagctgttgctacaggtggccacaaatctgtcacttaaacccacacaaattgatgtccttatggctttggagtcagaagtgtcaactgaaggtactagcagggctgtactgacctggtggcctcagggagcatctgtgctgcttctccaccttctagaggctgctgcatccctcgctccagccccttcctgacaccactcaccctcctacttctgttatcacatcctcaccttctctgtgttcagggctccctctgtctctctcttgcaagcacacttgggattccattgagggccacccacataacccaggagaatttctccacctcaatatccttaacaactgcagagcccttttgccataaaagttaccattcacgggttccagggattgtgacatgggtagctttaggagtgattattcctgcctgtctcccgctcaccagaacttggactttctctctcaacaggagccccctgtgtgggaatagcctgtctcaacgacgccctctataaggacctgcttcctcaaaggacctcatagtcgggtcctgcccctcagtgtccagtctgccttggctggaggggctgcaggggtgtgttggcgccacctggtggagacagggcatcacagcaggtgggagcccagtagaagcacaaccaaaacatgggtaatgtttaaaattttctggctaagcgctgtggctcacgcctgtaattccagcactttgggaggccgaggtgggtggatcacatgaggacgggagtttgagaccagcctggccaacatggtgaaacatcccctctactaaaaaatacagaaaaattagctggacatgtggcgcgctcctgtaatcccagctactcgagaggctgagacacgagaatcgcttcaaccccggaggggttgccgagatcgcgccactgcactccaggctgggcgatagagcgagactctgtctcaaaaaaaaaaaaagaagaggggaggcgaggggaggggaggggaaaagggggaatttgtttggagctgagacatccatcttctcctgacctcagatatttgcactcctggttatgaagccttcacacttggactgaatacaccaccagctttcccgatttccagcgtgcaaatggcagatcgtgagacttctcagcttccataattacatgagccaatttatatatataaattgggtcctccagaaaaacagaataaattatatatataattatacgcataacttaattaaattatacgtataacttagctatatatataatttattctgtttttctgaagaaccctactgacacaaatgttgagcatcttttcatgtgcttattggcttaataacttgtacatcttctttggggaaatgtctattcaagttctttgcccattttgtaactgaactattaatatttgtctttacattgttgagttgtaaaagttccttatatattctagatactagagccttatcagatatatttctgcaactattttctcctaatatataggttgtgtttttattttctttttctttttttttttattgagacagtctcactctgtcacccaggctggagtgcagtggcatgatcttggctcactgcagactcgacctgccaggctcaagcaattctcccacttcagcctcctgagtagctgaggttataggcacttgccatcgcacccagctaatttttgtattttttagtagagccgaggtttcgccatgttgcctaggttggtcttgaactccctgcctcaaagcgatctgtcagcctcagtctccctaagtgctggaagtacaggtgtgagccacagtgcccggccatctattttcaatagtgttttttgatgtacacaggtttggaattttgataatgttcaattcatccatttttttttttttttttttggttctttctactggaccaccactcttgagccctctaatccaacctccacgcggcagccagagggagctctctaaatgtaattactctttccctgctccacctgctcaaaacagtgtcacatttgtgatttaaaacagtatttctcaaacctaatttgcaaacaaagcaggtggaactcttcttgtatgcacagcatctgatttggttggtctggcatgggtctgggagtgagcacacctaccaagcggctgctggggtaacttgcgttttccactgatgatttcagcaatgtttccggtcccacatgctcctccagaaccttgtactcccccatgaaaaggtggagtccatttccccttcctttatttatttttttgagacgaagtttcactcttgttgcccaggctggagcgcaatggcgtgatctcagctcaccgcaacctccgcctcctgggttcaagcaatgcttctacctcagcctcccgagtagctgggattacaggtatgtgccaccacgcccagctaattttgtatttttagtagagacggggtttctccatgtcggccaggctggtctcaaactcccgacctcaggtgatccgcccgcctcagcctcccaaagtgctgggattacaggcgggagccaccgcgcccggctatttccccttcctttgaacctgatcaggacttgacgatggcatcaacatggtgagagtgaccctgcatggcttatgaggctgggttacacaaggcgatgttgcttctgactggctccctctcaggatacatgcccttggaacccatcctctaagctccttgggagcccaacttagcccatgtggagacaagacagggagagaaacagaggcacccccagccctcagccagcatcaaccgccagacaggagagcaaatgcgccaacaatgattccagctgaagcctcagacagcgtggagcagagatgagggatccctgcagattgcagatgcgtgagcaaaatgcatgctgtcactgttttgaaacaacaatgtctgggggctgtttgttatgcagcaatagacagctgtaacaatgctgttactgctgtattccatgaatgactgcactttgagtagcagggggctagatcactagataagccccatggcttctgtgtatgctatttttctacttttatatccttttcattcactttttttttttttttttttgagacagagtctcactctgttgcccaggtgggagtgcagtggtgcaatcttggcggactgcaacctccacttcccgggttcaagcaattattgtgcctcagcctcctgagtagctgcgactatagatgcacccccatgcctggctagtttccgtatttttagtagagacggggttttgccatgttggccaggctgatctcagactcctgacctcaggtgatccacccaccttggcctcccaaagtgctgggattacaggcgtgaaccactgcacccagcctcattcactttctttacttggctcatttttccttgttgcctcaattctcctctaagatcactttcctgacatttcagcctgggcctgttgccttctctgggtcccctccgcctcctgtgcctcccccatctcagccttgatccctcagattatacttcctctgtccccaccctgaccatcttggctgtccctggatagggatgggtatcttctcccactggtctgggagatctggaaggacaggcctggaaaagacttggtcactgctggaaggagctcagttagtgtggtgctgaggacagtacgggtgaggctggccccttcacccaaactcccactctcttccatagatttcacctctgtggcccaggccataggattagggcaactccccttaaacatcgagtccatcctccaagctgtccttttttttttttttttttttttttttgagacagagtctcgctctgttgcccaggctggagtgcagtggcgcgatctcggctcactgcaagctccacctccagggttcactccattctcctgcctcagcctcccgagtagctgggactacaggagcctgccaccacacccggctaattttttgtatttttagttgagacggggtttcaccgtgttagtcaggatggtctcgatctcctgacctcgtgatccgcccgcctcggcctcccaaagtgctgggattacaggcgtgagccatcgcgcccggcctcatgctgttcttgaatagtgagcacctgttacaagtcgccccaccagcctctcacttgtacccccctcatctctttctccccaagagacagaggaccctggcacttgtgaagcatgacccagaccctggggccatggcatccaacatcctcattccccatgacccctactgtctagatgtagctgccaagagacccccagactccccgggcctctgtctagagtgccaagacagagagagaatgccctgccgcttgcatgctttgtggggtgtccttcccccttccctggctgctaggcgtgacttcaacgttctccccaacccccaaacagcagcactgacaccagctgcagacctggctcaggttagctaatgaggaccaggctggggatggagcctgaacccctaaaccccagtcctgtaccccaccctaatcctggggtctccactggacaaaacgaagcagcttggtttttcgttgttattgtttttgagatagagtatctctctgtctcccaggttggagtgcagtggcgtgatctcagctcactgcagcctccgcctcccgggttcaagtgattcttgtgccgcagcctccccagtagctgggattacaggcgcgtgccaccacacccagctaatttttgtatttttagtagagacagggtttcaccatgttggccaggctggtctgaaactcctgacctcaagtgatttcccagcctcggcctcccaaagtggaagcggcttatttttaaggagaaaactcccgtggaaaggaatcagcacctcctctgtcaacatttcacttctctgaaaagactctcacttccaacagaaagtgctttgtaacacaacaatgaggctgggcgaggtggctcatgcctgtaatcccagcactttgggaagctgaggcgagtggatcacgaggtcagaagttcgagaccagcctgaccaatatggtgaaaccccgtctctactaaaaatacaaaaattagttccgtgtggtggcgtgagcctgtaatcccagctactcaggaggctgaggcaggagaatggcttgaacccaggagatggaggttgcaatgagccgagatcacgccactgcactccagcctgggcaacagagtgagactccgtctcaaaaaaaaaaaaaaaagaatgagaacatatggacacagggaggggaacaatacacacaaacaaaatttagaaacaggtgaaaataattttagtaatatttttactaatactgatatgctcaaaatattattatttcaataagtaatctaaaaattattgagatgtcttatgttcttttcatcatactaagcctttaatatttggtgtgtattttacactcacagcacatctcaatttgcagtccccatgtttcaagcactaaataaccatgtgtgtccggtggctaccatactggacagcgttgatctgaaatcgcatctgtatgcatcaccagcatatttgcagagatccccatctcagcagcacacctgaggctcatctgcgaaagcacctgcaacttctctacaacctcccacatcacctccaaacacatcctcatgtcatctgcaaacacacccatagctcacaggccaatgcctaaatatcattgcaggcaccttcagagaaagcacttactaaaggggtatacttgattccacatctgctttgacctgcaaatctcccttctcctttacatacatttgcatctcatttgtatgtcaatctaaatccactggcagagcctcagatcatcatctcaaagtcaggtggatgtggggctgggcaggcctccaggtgttcctcctcctgcttcctctggggctcttgatcctcctcctcttccttgctgctctcctcctcctcctccaatatggtgaccagttcctcccgcagcgcccccatctccagccccaggctgcacagctgtcccagcagctggacatccactcggcgcaggttcccctgccagtaggaaggggacgtcacagggatgccaccccagagagcaaggggtctctccaggacctgggtgagagcaggtcccaactcatgtcctggccacagcgcctgggcagggtcctcactgtgcccatggaccctaactgccttcctgcttctcagagtgtctcttgatctctaactcttctctttgtctctccatttcattgtccctgacttctctctctctgtctcctccctctcttatctatatctgtccctgtttccctttgtctctgtccccatttattttttgtctttccatgcccctgtctctctgtctttatgtgttgccatttctctgcccctgcctttggctctctttctctcgcttgccctctctctgccctccccaactttctcaaattcagtctgtctctccatctctgttcctgctctccgtctctgcttcccacctctgtccctctcttttgggatctccctgtccccacctctgttcccgtccctcactctatgtctgtctctcggtgtctgtacatgcctctcatgtctctgcttctatctctcagattctgtttttcgatctctggccttctctatttttgttcatttccattcattctcatttcctctctttctctttcccttccaaacccctcactcaccagctcctccctgatccacagcagactatcgcaggcacctccagtgtctgcccctgcagtcctgagggtctgaccagggatttccactggggagacctccctcagggcctgggggggtgggcccagccccggaggcaccagtccagcctgattcagctgcctccacagttccatcgtctctgagctatggctgcaaggagcaggaagtagcaaggtccagggtggcctggtcccctggggagctgtgtgcgtggtggagagtaaagggcagagggagtgggatgggggttcctgggaaaggtatcccaaagtccactcttcagagagaatcagctggccttgtgcttttctttttccttctgaagtctaacctcaactctgctcacagggttcaaacatagcctcttgcagaggtctaactccacccttccctgcctgtctcaggcctgacccctcaggggcgctcagtgtctgtagatgcctggcaccctctgtccttccacctgccccccaccaccacttctccagcctctcctcagcctccatttgacctctggcttgcccatagcttggtccttgcttgtcctcttggcacgggtcatcctagggctttcccaccagtgtgcctttgggggcaggaatggctcccaggggcaccaagacagcaatcccttagctggagtgcctgtgtccaggctgctggcctagggccaagcagccaattctgctgaccctggacttgcctatgggtatattatccctgttgagggtgagggcttctgctgtggaaaagtctgggaagcactgcaggcctctctcggccttggacccttccttcagacccaaggtgcatatatatacatatatataatggtagatcacgaggtcaggagatcaagaccatcctggccacatggtgaaaccccgtctctagtaaaacacaaaaaattagccgggcatgctgccgcgtgcctgtagtcccagctactcgggaggctgaggcaggagaatggtgtgaacccaggaggtggaggttgcagtaagccaagatcacgccactgcattccagcctggcgacagagcaagactccatcttaaaataaacaaatgaacaatatatatatatatgtattttgttttttgagacagagtctcgctctgtcatccaggctggactgcagtggtgcaatcttggctcactgcaacctccgcctcccgggttcaagcgattcccctgcctcagcctcctgaacagctggggttacaggtgcacgccaccacacctggcgaatttttgtatgtttagtggagacggggtttcaccatgttagccaggctggtctcaaacccctgacctcaggtgatctgcccacctcggcctcccaaagtgctgggattacaggcgtgagccaacgcgcccagccccaagtcccttttaccatagaaagtaacatagtcacagtgcccagggattcacaggtatggggagagggttcgttattcagctgccacacccaccttcctaaacctgctgcccttccagtttcctcacgtgcacagccacgcccgtctgcttttagtttctcaatctgttggcttaaccttcaaaacaggcccaggatttgagcacttctcaccattccctctgccccatccccattcatctcttgcctagactgctacagcagcctcttttactggtcccctgcatccacccttgccctctaaggcaagggtccccagtccctgggccaaggaccagtaccagcccctcgcctgctaggaactgggccgcacagcaagagatgagcagcgggtaagtgagcattaccgcctgagctccgcctcctgtcacatcagcagtggcattagattctcataggaggcaaaccctattgtgaactgtgcgtgcgggggatctaggttgcctgctccttatgagaatctaatgcctgatgatctcaggtggaacagtttcatcccaaaaccatccccaccccacccccgacccccagtctatggaaaaattgtcctccacgaaaccagtccctggtaacaaaacggttagggaccgctgctctaaggtacattctccacctggcagaaataatctttacaaaatgtaaatccgattttgacactcccttcttcccactgtgaatagaataaaaccctaccaggcctgcaccgtcagcccctgcccacctctcaacccagtctcctatctctgtctgcaagctggttcccacctcaaggcctctctgctctagaggctacctctccctgcagcgcttttcccctagatctttgaatggctctttccttatcattcacttctacttcaatgtcacctcttcagagaggcctttgctgatggccctacacccagtcacttttttttatctgcttctcatcaaaattgccttgctgattcctttgtttcttattcatcctctcccacatccatcctctcccagcccagaatgttgacttcctgagagagggactgggtctgtcctgctcaccatggtaacctcggcatctagaacagtgcctgccatcacgtggtaggtgctcagtaaatattcttggaactaatgaatgaataattctatccacaagacttcacaatggctcttcatgctgcgatctagctttcaactccaaactggtcttgagatctcacctcagtctctaaccttgacatctaacctcttcacccactctcttacctgaccctaatttttaaaaatgacgtggtcagcttttcagccccctcattccctgtttttaggaggtagtgagtggaagctggaagaataagaaagcttggggagactgcaattgcagtcaggaaagaaaggtactctgccgggaagaacaccccatcttctcctagggaaagattgtggagtcctggggtttgttttgtttttcaattttttgttttaagagacagcgtctcgctctgtcacccaggctggagtgcagtggcgcaatcacagctcactgcaacttcgacctccccggctcaagtgatccccccgcctcagcctcgtgagtagctgggaccacaggcgtgcaccaccacgcccggctaacattttattttttgtggatataaggttgccctatttctttgtggagataaaggctcccctatgttgcccaggctggtctcgaactcctggcttcaagcgatgctttcgcctcggcctccacaaagtgctgggttcacaggtgcgtgagcccgacctgtgtctcgttttgaagctcagggagagggcgctgtgagcaatccctaaaccctttaagagtaaaaagtgcgtgcacctttaagaggacggttagaaaacgcggggcgtggccacaggagaataagttcgcgctgaaccaggagcgtgggataagaccggccccttccggttacgaaaccttagcaagatggcggctccctgggcgtccctgcgcctggtcgcccccatgtggaatgggcgtatcaggggcatccatcgcctgggtgcggcagtggccccagagggcaatcagaagaagaaaaggacaatactccagttcctgaccaactatttctacgatgtggaggctctgagggattacttgctccaaagggagatgtacaaggtgcatgagaaaaatcggtttcgagacaaggagtggatcaggccagataagtatggccatttctctcaggagttctggaatttctgtgaagtgcctgtcgaagctgtggatgccggtgactgtgacatcaactacgagggcctggataacctcctccgcctgaaggagctccagtccttgtcgctgcagcgctgctgccacgtggacgactggtgtctcagccgcctctacccactggccgactcgttgcaggagctctcgctggccggttgcccccgcatctccgaacggggcctcgcctgcctccaccacctccagaacctccgcaggctggacatctcggacctccctgccgtgtccaaccctggcctcactcagatattggtggaggagatgctgcccaattgcgaggttgtgggagtcgactgggctgagggcctgaagtcagggccggaggagcagcctcgggacacagccagccctgtccctgcctagcctttagccctgtccccactcacgtggcttctcagcgggctgcatggaatgtctggtagctcaccacacttctggcttccatttgtcttcactcaacgtcagggtgggggagtggtgctggccaatcacaggagagagcgtgagttcccagtatttattcctggctgcccttggctaaaggtcacagctcctgtcaccctgtcaggcagccctttccatgcccctgttcaggcctggggaggtaaaggctcaggctgttagtagccgcagagagccacactcaccttgtcaggagactcttctcaaactgtccttatgtgagtgcactgccatttcttgcagggaccctgactgacacaggggctactactgacactttacagggatggttctcccccgtgcagggccgctgtgcccactgcaggacatgcagcatccttcgccccactccactcactaaatccataaccagcaatactatggggcctgctagttctagatcgcgagcggccgct

SEQ ID NO: 735330 - DNA, 187746 bp, Homo sapiens
ctccaaggctgagggatgaggagacctgctgaggacccagggccttatctttccatcccactccataggtcccagtattgactgatgctgtcttcacctcctagcctcacttttaaccttctggcacccgcccaccactgtccagttcactattgaagccctgccgtccagtgctgcagagggaaaggatgttcttctactggcctgcaatatttcagaaactattcaagcctattattggcacaaggggaaaacggcagaagggagccctctcattgctggttatataacagacattcaagcaaatatcccaggggccgcatacagtggtcgagagacagtataccccaatggatccctgctgttccaaaacatcaccctggaggacgcaggatcctacaccctacgaaccataaatgccagttacgactctgaccaagcaactggccagctccacgtacaccgtgagtgattcccccatacctctgggtgctggcggtcagttctgcttcacacacatgagattgtcaggcctgggctgtgcctgcatccccctctgcattttgtcccgtgttgagatttgggcatttagtgcaggacacacacatggtaggtaaacttcaacagatcagaattcctttcctgcatccaggccctgcagacactgatggcgggggcgggggggcctcagcagggggaggtcagtctcagccaagcaccccatgccctccccatgaacctgaccctgagaaagaccctggagaactgggtcagggcctggcctgagggcgtcctgggaacctcacaaaagcccagcctcaggactcctgactccgtgtgaccccgggaagcctgtgtcagggctggggtgtggtctcctgggcagggcttactgggagcaaggatttaccagatgtctgcgggctgtggttcctgaagcttctcatcagtgagggctcagctcccagagtctcatctagacaaggacagagcctaccactttccctgggactcagcctggagagggcagggggacaggattactagggcattggccccctgaatgaggagcttaagagatgcccttgggcagtcagtggcccaggggtaggaacagaggggagaaaatgttcctggcagcttcttgtccaccggggatcatgcccaggggtgctctcccatggaggcaaataacagatgctgttgatgtgaacacctcctctgtgccaagcttcatgtcagatcctgtgaataatttaaagttcattcacagacaaagtggcaagcctcagaccattttccatttacatattgtatggaggggaaactgaggcacagagagatacagacaccggccacggtgggcagatcgcagctggcagagtcacatgagggctgtctgcagctgctgccacgtcctctccttcatccctggtgccttactaggtgtctgtggaccttagaacagccactggttcggatgttttcttcttaggtgtctacagctcggagggggagattctggtctggagagttatgagtaaatacagaattaatcagttttttcttaactaaatcacctgcctcaacaatcagtcagtgctggggaagttcaggcctcctcgctcaggtccacaccccgcatctctggacatgaaatggcttcgtgtgttttctgatgtgtgggtatcattccaacaggaggataaaggggaggactttgctttctctccccattcacaccctgcaccagccagggcccagtgtgagacacatactccgtagttctctcatgaaggagggagggaatgaatgaaggaatgatctataacctcttcagagacagagacctggatacaagatcctaggaggttctgggcccaacgtgagacacacactctgtagttctcttatgaaggagggagggattgaatgtaggaatgatctataacctcttcagagacagagatgtggatacaagatcctaggaggttctggccacacctgttttctgtccctctagagcctaagacccatgtctcattcatctggcccgtttctcctaaatctgcccctgggagctgagtctcatctgaccctggggctgcagggctgtgggaaggttttcaggggagggatcaggcttgcgggtagtcccacacgtttgccttacaccctggagctctacctggttctcactatgaatatcccataataatcccccctatcctttctggggagtagaaaaaaagtaaatatttaaaaatatgccagagcatctgttcttcttagcaagttcagatagttattagttagcaggaataaatcgttattttaccagagcctcacctgctgggggtttatgggagcctaactgactgaggggggtgggaaatatccaactccagccccctctagccatcatgtcccacctaaaggagagaaaaaactgagaggcacttgtgacattcacagcccagggcacagactctatccaggaccacagaacccctccctccccccactcaccaccgcatcactgaacgcctgctcacccaagttcctgttgcccagtacatcatgtcctggctttcaacaaaaactacaagacagactagaggcaaaaaaaaaaaaaaaaaaaatgcagttcgaaagacagaacaagcatcagaaccagatgcagatgtggcagggatgtggcagggatgttgaaattatcagaccaggaatttaaaacaactctggggccaggagcggtggctcatgcctgtaatcccagcatttgggaggccgaggcaggcagatcacctgaggtcaggagttcgataccagcctggccaacatggcaaaaccccgtctctactaaaaatacaaaaaattaggcaggcatggtggtgggtgcctgtaatcctagatactcggaaggctgaggcaggagaattgcttgaacctgtgaagcggaggttgcggtgagcctagattgtgccactgcactccagcctgggcaacagagcgagattccatctctaaaacaaacaaacaaaaaacaatactggctaatatgctaaaggctgcaatggaaagcatagacaatgtgcagaacagacggatgctgtgagcagagagatggacaggctaagaaagaataacaacagctactatatctatctatctatctatctatctatctatctatctatctatctatctatatatatgtatatatatgctagagatcaaactcactgtaacacctggatctcagagtggttgtgaggatgtttattaggagattaaagagattaaagcagagttatacacagggcgagagctcaactgatgctatcaactagtattcttatttttttgatgttgttattggcaataaaatcaggaacaatgcagtaaaaatttggttttatcatgtacgagttctgtgaccttccttgacttactgaggtactgtaagtctcagattctaactctgcagatggcggtgatgcccctctccctcaaggtgatgtgaggatgagatgagctgtaggtaggttggtgcccactgtgcctggcacatggaaggcccctgaaaatagtcaatgaacatcatccccgctcatcagcatggagttgacagtgagggctcgctctctgtgacaatcatggaatggaaaagaagaaacaagaggaagactgggcgcagtggctcatgcctgtaatcccagcactttgggaggccgaggcgggcagatcatctgaggtcaggagttcaagaccagcctggacaacatggcgaaatttcatctctactaaaaatataaaaattagcctggcatggtggcacaaacctgtaatcccagctacttgggaggctgaggcaagagaatcgcttgaacttgggagatggaggttgcagtgagccgagattgcgtcagtgcactccagtctgggtgacagagcaagactccatccaaaaaaaaaagaaaaagaaaaaagcaacagagggaagaggtgtgacatgagaggaagaagggatttaaaggtacaggagcagggcgaggtgcaagcacctgtgggagaatgtaggagttggtacatcccagtgtgtcaagtctgagacacagaaaatggtgcaaccgtggagagcaagggagtcagctatgaggacagcccaacagaccacactcaggctctggagcatttccttcctccctgactatgcccctgccctgcaatgccccttatggtttcccttggaacaaacttgggccttgtcccctttgccttcccctttctgcagaaaacaacgtcccaggccttcctgtgggggccgtcgctggcatcgtgactggggtcctggttggggtggctctggtggccgccctggtgtgttttctgcttctctccaggactggaaggtaccgcagcttttccccagcctcctcccacccctaggctgaccccagtcagggaggagggagaccccgccctgtattcagggccaggctttccgcatcctcccaaggaatccttccctctcattccatggctcctcccttgccagctgctgatcctaggctgcctcttcctttatgaatgtggcacagttaaggttgcacccctgagtgctgtcctagttccctaacacagcaaagccacagctgcctggagggaggaagggagggagggagggagggagataagacgggagtgctcagaacctggtaccttctgctgttcattgaatttacccacccagtgaggagggatttgcaggcttgagatccatggtgggggtcctgggcatggtcacgcagtggggagtggcaaagcctggacaggctgggtagggtcagcaccccatcgtgattgatgtccctgaggtgtgagatgggagaacctggacctcaggacctgctgtcctttatgtctcttgccaaggggtggagagagagaggacaaggccattgccccatttcagcatctccaggcctgaaaggagggtctggccatggcagggatactgagttctgggagaatatgatacatgctccttgcctccccatgcccccagctcccccagtgtcctgcacacacagccggccctgctttccctctggggccttgacccttcctctcaggcaaacgcaggtggtctgattccctccctgagtcctcagtccctttcctgggtccctgggtcaatgttctcctcacccggcatctgcctgggggggtccttcctctctggccaggacagacgtgactgcttaaggcctatcctcagctccccgtcctcggccgctcctaccacgaaactgatggagacaggaggccttcactccagtccttgaaaatggagtcccttccttgtcctttattctgcccctaaacctgtgatttctccctgcaccctcatgaataatcctgacctttcctagggccagcatccagcgtgacctcagggagcagccgcccccagcctccacccctggtgagtgtcccttcagcccaggtgtgggagcccctaggcctgccctacggtgtccactcctgccagtcaccccctgggggcctctgaccctttctttggggctgcaaggaggatgtcaggaaacatgacacaggggaccccgactgtcttgttcagactgatctgtgggctctgggtcgtgggtcacctcctcgacctcagctgctcaggtctcccctgggaagaggctccctctccctgattctctgggagctgaggacccctacactctcctgcaggaggggcccaggctctcctcccaccctgctgctcactcctgtctctgtccccaggccatggtccctctcacagatccaccttctcggtaagcctgttccctccccagcccttttctactggggtcccaacagtgcaggctcagggcagggggaccatcaaccccacagcacagcactgacccacctttccccagaacagtcaggtcaaagtgagtgcctccagccaggatccgggcctctctacagggccaggaccacccacgccatgtgctgacccctccccgggaccctctacacctgaggagaaccctggagtccagcaggtgcagaatggacactgggaccatcagtcagaggcccacattaacaagggtgcggggtgggcccagccaggacaggggtcagggtgttgtgtccacactgggaggctgagctcaggggcagagctggtcaatcctgaggggaaatgagtggaagtggaggcagggaagtaagtcctggccgatcagagacaggaaccttccaggctgggcttccgtgaccctccctccctgtcccctgacatctcctctctcccctgcccaggcccctctacccagccccagaacagccactcccatctatgaggtgagtgtgggccatggatgttctggtcccgcaggctccaggggacccaggatctgcccccaccagcacctggctgagctcagattcaggaaaatgcagtgaaaatgagaacaggtggtggtgagcagaggagggaggggcctgggaacagggaccccctgagcacagccaggttcagccccagagaagccctgggtgggcccagagcctgggagatgccagacactgttctgagaaggctacaggggttgaggcctcttctctgtttttacaggaattgctatactctgatgcaaacatttactgccagatcgaccacaaagcagatgtggtctcttaggttcctctgggagctgctcttgtgggttgatggagcgtccccaaagctcccagccctggggacggggaaggacatggagcctgagccagagaaccagctctgagtcctgaggagacacaggcctggggacagggagggatgggagtccctgctgaatatctggagaccctgacaggttgccctgggctctgggtgggccgggacaaaggcctctcatcaccacaggaagcgggggcttgcaaggaaagtgaatgggcctgtggcccacccggggtcaccaggaaaggatctgaataaagaggacccttcctctcattggctctttttctgctcacgggaacttagcagaaactcacctgaaactccgtgtccattctctcccgggtcacacagggaaaatatctccaccttgtctcaaccacagtctctcttccctgggaggcagaaataggggttgggagtcaggctggggtgggccctacacaggaaagggcaagattcacatgagccctgcccagccagccgagcgctcagctgtcctcacactaccccagggaccaaggccatgcacagccccagcctgggtccctctgtgaatgcatgtggggtctcaggagcacagaagatggggccatctgatgtccacaaaaggtgagcaatgcgggagcaaccatgggtggtataggttgcggctgtggcccctacgcagcctccagtgtcctgacccctgctgccctcttcacccaggccctggaggcccagtctatcactgtcctccacaaatgaacttacctgtccccaaatccaggatcctgtgtgcttatacctggccactaggttctcctctgtcccagtggctactgctcaggacatctttatccctggtggggcacagagaggggctgtcagagcaaccaagattaatacagacgcataattcagtccttgagcactacccaggactctggcccctcattgctcatcagttcccactttaccccctggcatggatctcactgagcaagccaactctttacacaggagcatccaggtcagaggtgcaggactcccccatctaaagctcatgcaggctcccatggcgatgggacaacctgtctgctcctctccctggcccacagccctatctcgcctgcagctcctccacacacctgggacagcagttctcagcccttccctgagggcccctggaagggtgatgatctcatataggttcacttgaaccaggtgccaccttcccacaagtgagctggtgcctgcactaaagcacagagccacagttcccaagagtgttctgccactgccacaggtcccaagagtgttctgccactgccacaggttgttcgtcctgagatgagaggtaagaaaacaacccgcaatgggttgttttatatcgggatttgcatcaggatttagctctaaatgacccctgatcccacctgcacacagcgtcagatgagacaaggtgaggcctctttagttttctgttgaggctgtgacaaattaccacaagcttagtgacatagaaacctgaaccaaagtgcccacatggctgtgttctttctagaggctccagggaagagtgcatttcctctccttttccacctcctagaggcctcctgcaaccttggctgtgtcctctttctccatcttcaaagccagcagcacagcatcttgaaactattctgtgccctgcttccatccccacatctccacctcctcccacctccctctctcacttaaaaggaaggagccttgtggttattttggacgcacctgggataaaccacaacaacctccccatctcatgatccttcctttaatctgtaaagtgtcctttaccacgtgacatgtccacagatctggggatgaggatgtacacatctttgagaggcccttgttctgtccatcactcctctcaaggccatcttctcatcatcgttcactacaaactacacatgggcacctggatgggttcatcatgactgtggcgtcagttcctgcattaacatccccagcaccctccagatcctgagagagggagacggagggctctccatgcccctagtacctctccaccttcttcttggtgacatgcttagttgctaagaataacagaaagcggaggtgactgaaagatcacaactcaccggcccttcaatagttcgtggacatcagcaccacggacagtgactcagtgaggctaatttccaggtggcagcagggagcatgcagataggagggaactgcaggaaaagctgcccattctattctatatgagaaagagtgtaagaaagaggaagctattacagggataatgctattcttctctaatccataaattgcgaaacctttgcatgtctggatatcatggtttttagcacatctgctgccactccctgcagggctgattgctgcatccaggatgtggtctcttggggggctcacagcctgctttggcctcatggtgagtctccctgcccctgacactcaggccactgtctctgcctacaacatggtgggaaccttccatgattaacgtctgattctctgtgcctgacctttgaagcacatccatcactcagcctggagcatccgctgagctcagcatcctgctcctccatccccagctgagcccttgaggagatgcttgagaggatctcctgggctcctctgtgagctcctccaggctgagccttgtgcttggtgtcagaggcctttgccatctgcttgttctttccataggcaaataatcctcctcagggacaagtggggcctgaagatctgtctgaatatctatctatctatctatctatctatctatctatctatctatctatcatctatctatatgtatgtatatatgagaatgctttattaggcaaaactgcatactatgaacatgctttaaaatgcaacaggatgagatgtgaagacataaagaacaagtgtgtagtgacacatggctatcagaacacactgaagaatccacaccgcggccgagagcagtggctcacgcctgtagtcccagcacttttggaggctgaggcaggcagatcacttgaggacaggtgttcgagaccagcctgaccaacatggtgaaaccccatctctactaaaaatacaaaaaatttagccgggcctggtggctcatgcctgtagtcctggctgttcgggaggctgaggcaggagaattgcctgaacctgggagacacaagttgcagtgagctgagatcgcaccactgcactccagcctgggagatagagtgaggctccatctaaaaacaaaacaaaacaaaaagaatccacactgcttccccgcttcactttacccagaaaaggaatgttctaggccacttcctcttcagcacacatccccagggaactaaaataggttcacagtcacccccatcttcctcattcccatcacctcttacccacagaggcatctctggtcctacagatccagccctgccttcaagaggcacaggtccaacccatccagtgtccctgctagtcacacacagcactcagggtacaatggagggcttctgtgctttggatgggaacaaaccccacctcacattcccacacctgagaagccaccagggtcctctctgtcctgtcctcacactcaatgtctgtcctgggtcacccttgtcatctctcctggaaataggcatggctcctgacaggtaggattgaggctttgtcttttcaggagtccctcccactctgagcacatgaaactgctcagctccatgcaaccctctctcaccaggggccttgttctctgggtccctgaatacctgggtccatgccatgtacattttaagaaaaatgacagtgactctcaccctgacatcctcacccaaggcacgtgtctgacaagaatcaccaggtgagatacctgtggctccacacacctgaggcttcactgcgcaggggtgtcctcatccctctcctcccacccctagggacagtaagcaccacaggctgccttggaccaccagctccccctcccagacacagcctcagatctatactgacatgctacatggagaggctctgatgaacagcaggtattaggaaatcccaccgaaccaggtgccacttgcggccccactcctcctcatatctgtgactgggacagacacacataacacacctctgttcaccgcccagcccccaaggtcaatcacagtctgcttctcccctagatccactgctccccatgtcttccgtcctcagctgcatcctgggtggcctccttgctgttcttgtaccccagaggcaggttccaacctttgtgatgttgcctgcaatgcccaaactttcccttccccttccccttcccttttcccctcccccttcccctccccttcccctccccacccctatcccttcgtcttcccttgtcttcccttcccttccctataaagccaaacatacccatccacctaccttgtggtcaaagtcatcagcctcctgctccactcagtgttctctgaccctgcatatggaggtggtggcccctcctagaacacccaccactcactgtcagccttgcgtggtaatcacagattttgcaggggttacctgtgttcaggtgtgtcacctgtggaaccagaactcttggaaggactggcagagggagctgcttaggatatctcagggctcctggcatctggtctaccacagggctattaacaacagcacttagggacaaggtggaggatggacggttaagagggtaaatatggatgatgtgtgggcaaagaataggacacaggaacacatgcagtactcaaataattatgccaagaaaggtgaggacatggagatggacattcccatatacttctgatgggactgcagtttagtccctacagcaacattgacctcatcatgtttaacgcgcacacgctctgaccactatcctacttctgaaggcctccctgtgctgtgagctctgagaaggccaagcttgcctgttctgtctctgctaaagccagagaccagccaatagcccagcacagggtacttcataaatacatgttgaaggaatgagctccaggaacagtactccacatggtagagatgtgtgtatgaggatgttcactgcagaaggtcatgtcaatgtgacaagtgacgagcagcctcaaatccagcaacaggggtgtgggtaaaagatcatagtgtagccatgcaatggaaccaatgaaaaaaccacaattagagcaaatccacatgtattaataaaggaggtgccctccatacatgctgcacctaacagaatgttgccaaataagaatgaaaaatgatgatatttgggctgtaaaaactagaagtcagctaaataagaatgcatcgaaagtatttgtgaatgcttacaattttataatgccttggcatccgttttggatggaagttggactttctcataccagaagcagggctcagtcacctttgaaatagtttccagttctccacctccttccagttcctcagtgtgattgatcagatatctgatttatacaactgcctcctggtgacctcctccctatgggacttccggatacagcccgtatgactgccccactgaccccacaccctgcctgctgcagtgaccacctctaattacctggatctcatgtctgcttgcattaaatccaccaattaaaactccctgaggacaatctgtttgaataatattctgtaccctaataaaggccttgacccatgggttccccctctgtcctccccatactgcccctgacctctgtgtgtgtgtgtgggtgtgggtgtatgtgtgtgtgtgtgtgtgtgtcctccagacagggcctgtatcccccaggacctgtaagtaataaatctttattttcatcttatgtctctcgcaatcattggcaagagctctgcatcttaaagatcgcaaatttaagaaattggtgtagtcggcacaatagagtacctcttctgtttagcacaagatatctcggagctgctgaggcttttaacatcctcgccggtgtggctgcctcactggtgaggccgttctgttcagtgcaattcagttgctccactgtgtgctgctgtgttgctgctgtagagtgctgccatgttgttctccccaaattgttaccgagtaggaacctgtaatgtgctcccaaggtggtctaccccatgagaagggggattctccatctagggcaagggctaggtgtgtttctggaatcctaatagggaaggcatccacagagggtgaactccactcctccttagagtgaggagtgacatttcccatttattttccccatggaggtgccatgtattgactttttctttcactgtcccaaggttgagccaaggtgagctatggagaccagggcaagataccatttctgttagcaaagcaaatgggtgacaacgtgtggagaagctgtggttctcctgatggatatagcagagtgccatttagtaaaatcttgtcaggaggctgcccctggttagaccggcagtgtctgtagtcactaaggtggatgcgaattttaggccctgggccatggataatccctgcagacacagccgtggcttcatgtgatggggcaatcccgggctagtggctcccttgtttctgcatttcttgctgtggttgcacaatcaacacctcaggggttgattgggtcaccttggaaagagaaacagctgcctaggaggctggtgcacatggaggccaccctcaattttattctgctaacaagttgtaagattaaaacaacagggggctttgggtaccatcaggaacttgtcaagtaaacatccaaagacagaaagaagaaaaagaaaaagacattaaccgtctagaaatacaagccattttaaagattttgcttaaaagatgcgcttgggctgggagcggtggctcacacctgtaatcccagcactttgggaggccaaggtgggtggatcgactgaggtcaggagttcaagaccagcctgaccaacatggtgaaacctcgcctctactaaaaatacaaaaaattagcagggcatggtggcaggtgcctgtaatcccagctacttgggtggagaatcgcttgaacccgggaggcagagacggcagtgagccaagatcgcaccactgtactccagtctgggcgacagagtgagacttcatctcaaaaaaaaaaaaaaaaaaaaaaaaaagacgggcttgtttcgtcgttgtggagtcatcccagagagaggctactccctagagtcactgaccacctttcctcctccatcttttcctcttatcattctagagacagaaaacaagaatctcagctttaggtggctaacctcaccccccaagaaaagaaactaccactttgattgactacaaatccaagaaaaataaaagagaaactttaaaaagtactgagcaaaccacaggtctagcaaacataatgctagccctaggttacttattcatttacaacaaacccctagatataggaggaaaaaataaaaggtaattaaatatatacacatacaatattttaatataaatatataataaatagttaaattatgtatgtataatatgtaactaaatcaaagtaaaatttcatactttgattctattggaaattcaaaattcatttattaacttatatattaaggaatttatgtaaaaaaagatttttaaaagggcaccaatttgcttttgtgtctctacaacataggatctaatttaactttacatttgctaaatacactaattgacaaatattcatggatttaatcaatactggggctcaaattgtagccacacgtgggaatcccataaatttaaacactctgtccctattatcttgagaagaaaactaaatataaaattgaaaaaaacaggtatgtctcaatttacctgtaactttgcctaaatttcccggagtcatatacccattgctgtaaaacattctctattggacataggtgctctgagacaataaataaaatagaagtgtttttggtacttagacattggcttgacaaaatgggatcccatgaaacctcagttaagatagtgaatacggcccaatgtgagttgaaatggggcctttaaggattaaaacttattacatgaaacctagtaagtaatggggtgattatccatactgcttctccatttcatagcccaattttgacagttgtcaaatctggaaaaaacaaacaaacaaacaaaaaaacccctgggaatctgttgcctcacagagacacaaagtagacatcaaaattgtatatctcagttccagttccaaaatggtggcatagaagcaagctggctttactccttcacacagaaaaccaaaaacaaatatacagcaccaaaattattaccagatatattccagaactcaaatatgaaaatgaaacagttttcagagccacagagaagtgaaaaaaactcccgacagatgacaaaagaatcagatttccccatctgtaatgtccctccctgccccattctgcctggtaccaggtgtgtggaaaattttaccccaactcatggtttctacactgggaaatgtaagatcaatgcgggcaaccagtttctgcacaatcctgggttccctgtccctgccttaacccacaagaagcattgtgagtgcccgaagggagaaatttccctgaggacagtcaaagagtggggaggcaggactaccatctccttccctggaaactctgctgtgtaactcagccaagggagacatgaaatcagactggtgtttcagcagctccatgttgtagtaggtttgtttcacaggtatcctgggcatggacatctagccagctttcccacactgccaggatatcccctttgggacctccctcagttaggaagggcacactctgatcatttactagggccaaggtaaaccctaaaggtaacttagagatgaaaaggaggtagtgacctagcagtaaagaactctaagaaaatctatccaataaaaatcaaaacaagccagacaaagactaaaataaataatgaatccttcaatgtaaagacctggacttacatccacaagaaacagtaagcaggtaaccatgatctccccacatggacaaagtgaggaacaagtgactgatcctgatgagatggtgatgtgtgagctctctaatcaagaattcaaaactgcagttttaaggaaactcaatgatcttcaagaaaacatggaaaagcagttcagaaatttatcagagaaatttaacgaagggattgaaataatttaaagaaaacaaacaggaatcttggaattgagaaatatatttgctgaacaggaaaatttattagagtctctcaacagcagaatggatcagaggaaagaatcaacccaaataagactcccccaaggcataaaataatcgaattctcaaaagtcaagggcaaagagaagattttaaaacagaaagagaaaagaagcaaatggcataaagaagctccaattctgtggcaacagattttcagtggaaatcatacagaccaggagggagtgacatgacattctcaaaatgctgaaaaaatattgacatttgagaatactttatccagtgaagttatccttcaatataaaggagagagaaagtttcctagacaaacaaaagctgagataattcacaccatcagactagtcttcctgtaaatactaaagggtaaatactaaatacttcaatgtgaaagtaaaaaaaaaaacactaacatgcaaaacaaccacaacaacaataacaacatttgaaggtataaaatccactggtgaaattaagtacgtagacaaacccagaatactcaaatagtaattgtggaaagtaatccaatcataactctagcatgagtctcaaaatataaatctatcaaaaacaataatacattttaggaggccaaggttggcagattccttgaggtcaagagttcaagaccagcctggtcaaaatggtgaaaccccatctctaccaaaaaatacaaaaatttgcagggtatggtagcacatgcctgtcgtttcagctatttgggaggctgaggcaggagaattgcttgaacccaggaggtggaggttgcagtgagctgagattgcactactgcactccagcctgggtgacagagggagactctgtcttaaaaaaaaatagctacctgtttggagaaaggtaatataaaatatgtaaatagagacaaagtcaaaatttgcaaaggatgaaattaaagagtagagtttttttggggggttttctgtttctattattttatttgtgatctaagataagttgttaccttttcttctcttgaagatactttgttatatctatgtttttggaagtcttatggtaactgcaacgcaaaaaatctatgatagatccactgaaaataaaaaacaatgacttaaaacatactaccagagacaatcaaccacaaggaagacagtaaaaaatgaagaaaggaagaggggagttacaaaacaaccagaaaacaggcaacaaagtggcagtagtaagttcttacttaaaaatattgaacactgaatataaatggactctattctccaattaaaaggcatagagtggctgaatgctgcctatatgctgcctacaagaaaccacttcatgtaaaaagatacaaatagactgaaagtgaagggggtggaaaaagatatttcatgcaagtggaaaccaaaagagagcaggagtagctatactgatatgagataaactacaaatcaaagactataaaaagagacaaagaaagtcactatgtaatgataaagcgctcagttcagcaagaggagatgccaattataaatatctatgcatccaacacttgagctcccaagtctcccaagtatttaaagcaaacaatagtggatctaaaaggagagatagactgaatacaatattaattaggggactttaacaccctgctctcagcaatggccagatctttcagacagaaaatcaacaaggaaacttcaaagttaaactacacactagatcaaataggcctaactggcatttacgggacatttcactaactatctaactgttacagaattcacattattttcatcagcacatagaacattcttcagaacagaccacatcttaagtcccaaaaccagtcagaataaattcaaaaaagtttatatcacatcaagcatttgttctgaccacaatggaataaaactacaataaatgaataactttctggacacatacaacctaccaagatggaagcatgaaaaggcagaaaaacccaacaaaccaacatgaaactgtaacaaaaggaaaacccaggaccgaatgacttcactgctgaattctaccaaacatttaataagaactaaaaccaattctactcaaaatgctttaaaaaattgaagaggatggaacactttcaaactcattctacaaggtcagcattatcctgataccaaaaccagacaaggacaggacaaaaacaaacaaacaaacaaacaaacaaacaaacaaaaaaacactacaggattgcttgaggccaggagtttgagatcagcctgggcaacatagtcagaaccaatctcttaaaaaaaaaaaaaaagaaaaaaattagccaggcatggtggcatgtgcctttagtcctagctactcgggaggctgaggtgagaggaccaattgagcccaggaggttgaggccgcagtgagccatgtttgtgtcactgtactccagcctggggaacagagcaagatgctctctcaaaaacaaaaagcaagctgggtgtggtggctcctgcctgtaatcacagcactttggaaggctgaggtgggagaactgcttaagcccaggagttcaagaccagtctggacaacatagggggactccatctctcaaaaacaaccaaccaaaacaaagccaaaaaagaacataggccaacatcactaacaaacatagatgtaaaagtcctcaataaaatattaacaaaccatgtttagaaacacatcaaaagagatcattcactatgattaagtgagattcatcccagggatgccagtatggctcaacatatgcaaatcaataaatgtgatccatcacattaaagagaaccaagaacaaaaaccatataatcactccagcaagtgcagaaaaggcatttaataaaagaatgggttgagggagtggagcccatagtcagagcagcagtggtctgggattttggaagtagaaagaagggcagcaccactggccaggaccaccagggaacacccccataggccctgggtgttgtgctccagggagggttccctctggagttattaatcttggtgtccactttgcccagctgcccctcacagggtcagggaggatgaagggaaagcttccttctaatgaaagttcagggactcacagttcctagagcctgtagggagaggaagatcttcgaggaagagcacctgggcattggggcgtttgagaggaagatctatgccaggtccaagtggacaacctgtggactctctctccagggacatacgggtatctgggaatctcctgtagcttaaagaggtaaagacctctccctttagcctgaggactggaggatgctggttcaggtgaatgagtcctgcaggggctggtacaggcctggagggtggtggtgtccagggccttgggttcacccttagcatgattcaggccgggcggtgtttcacatgagcaagagggcctgggttcattgcttcaggacaatggtgaaatctcatggtggaagaaatcttgtccttgccagtgcccagctttcatttggtcttggcccagagtgtcctccctagagaagactcttgtcccttcttcacactgcccttcagggatatgccagccttatgggataagatggggtggagactgtagatgtgggtgggaatctctccacagagtgctccttctctcagcggttgcaccttgtctcagggcttcagcttgaaatctgggatctccaagcccttccctccccagtcctggccaggaccacatgggcagatgcattgtgtgaagtgcatttcatttggggtgtcctctctgcatggcaccctcccgttgattctctttgcgcatgtcagagtgcaggcaccatccacacctcctgctggaggagggacggagctgttgactcctgagagctgatcatgtgttcccaccctcacacacaatcatggtccatcctctgagggacatgtgttgccaccactgtggagatggtgcaactgacagtaacaaacagtaaaatctggtactgaatgggaccttaagccaacaatgacaatgtcattccaaggtgtttcatttttattgattcaatgcaagtcacctgatttcattgactattcacaatagctcgataaagtaaatgcatcatcaccaccactttaaagaggaaaaaggtgcttgggcagtttgtgactactgtggtggctgctgcattgctctctggtaaagccaagtaggtggtgggtgcggcctctgggctgggatgatccaccctcctggtggtggcaggggagccaagctggagccatggcctgtgcagtggtagcagctgaactgaccgctgctgcaggatttgcaagctgttacattttgcgaagccatgaagcacataaaacctcaagtagaacaagtgtttcaaagtctaccaaaatctgccttcagagattattactacagaggtggatatgaacccaaaatgacaaaacgggaagcagcattaatactagataatgaatgaacactagtaatagtagggtaagccctactgccaataaagaaaaaaataagagatgctcattaacatgttatgctcttaaatcacgcagacaaaagagggtctccttatatagtagccacaatcaatgaagctaaagatttactgcaagatcaagctaaaaacagtaggtgtataatgaatttttaacttcatattagtttatgtatatgaatatcaagtttttataataaaatgcctccaaacaaagaatatttgatttagggtttaataacttctaagaggggactcagatgtttcctgtttcacagtcagtctgagagggtcatttttcctggagctgacctgggtggaggcctcacactgatactccccagcatcctctctcctgatggggtttatgctgagcatacagtggccctgggacagctccattctctccatgagtcacagacgctggtcatggaagatccactggataaggttccagagtcatctgtggggcaggtcaggatcacaacatccttttcttctgtgactctggtgttgctgactcagatggggtcggagccactgaccctgtggacaatcagtggaggtgctcaactgaaagtgggctgagggcacgtcttctcctccatccctgggtccttaaggtaactgtggaccccagaccaactgacacaggagctagaaagaaattatttaggaagttagtgagggtaagagcgtccttggcaaggtttcccctttaacaaaaagcagcccaagataattccttttctaacaaagagcagcctgaaaaattgagctacagatgtagatgagcaagatggaagcttgcacaggtgaattccagtaggtgtgccaatagaaaagggctgcctggaagccaggtatgttcaacatggagactccatcctcccttttctccattaccacatgtacagtaaaaaaccaggcaacatggcaccggccaggtagacaatccatctgcatgacaaaagatcagagtggggcagccagcaaatggcacagctggtctaaacaatctttcaccccctgtataaatcagacactgcctcctgaagctcatctataaaaccttctgcatttcactatggaagtggcaacccattttccccaggacccctctctctgtgcagagagctcttctctttctttcccctatgaaacttccactcttaacttcactctgggtgcctgcatcctagttttccatggccatgggacaatgaacctcgagtattaccccagatgaatgatgctgtttcacaatcactggttcagctcccttcttcttagggtttcacagctcggtggggagaataccacgcctcagtggtctggggagtgaggaacaaatgaagaattaatcagattttacttagaacgctatcacctgcctcaaccatcagatccatgttgggaatgtccaggcctcctctcttagatctatacccacttcactggacctgaaatcctgtgtttcccgatgtgttggtgtcactcctatgagaggataaaggagagaactttgctttctctccccactcacaccctgcacaagacagggcccaatatgagacacacactcgctcagtagttctctcatgaaggagggagggagtgacctcgagtgattctgccatctgtagtctgtgtaccctggccagtggctgtatcttcatatgcctcagtttcccctcagtaaaataggacacacaatgagaactaaaaataaaattctaattccccagtgaactgaaaggatggcctcttggccaagcggatcccagagttcctgatcatgacaggatgggaggttacacctcattacagcccctccctttggaagtttagaggtgacaactgactagcattaacgctaaaatcgagatcatgagactgacagaacagactctctgtggccataagataccaaattataaactcaacctaaggtcatgcaggcaagggctaagccacactttcctacatttaaagaataagctatgttctaacacagaattttctttctctctagcggctaaagtaacactagccttcgagataagcaatattgaaatgatcgcggctcatccaccaacactggctaactgacccctgttccaacagccacaactacacttcaattggacaggagactgatttcagtaactttctcctaataagagaccactgagcatggcctggttctgctggtatacagacacggtgcactgagtaccataatgcttgtttcatcttttgatgtataagacctaatttaatacatttaaatctgaattctccaccccaaagtgaacatggggtgcatgtagcatgcatgtttgttgatcacgcatgtgcgtgtacttcctttgtgagtatccatagctccacctataacctgttgaatatgtatacctggccaactcattcagcataaatctatcttccacattcccctcccttgaagtgcctgctattggtctctgctggaggctgcatcttctaccctggggaatggccagcctgcaggctgtaaccctgtgtaagaaataacctggttgggtgcagtggctcacacctgtaatcccagtggtttgggaggttgaagtggtagaatagtttgagctcaggagccagagactagcctgggcagcatagcaagatcctgtctcttaaaaaaattttagggaggagagtgaggatcagaaaaaatacctattggctattatgcttagtacttggatcatgaaataatctgtataccaaacccctgattacatatataacaaacctgcatgcgtatctttgaacctaagataaaagtttgttttaaaaactatctgggtgcagtggtgcatgcctatagttccagctactcgagactgaggtgtgaggagtgcttgagctcgggggattgaggctgcagtgaattatggtcccacctgtgagtagccacttcactcaaacctgggagacagagcaagaaccggtctctaaaaaaaaataaaaatagaaaaataaaatgaaaaatatatgaaataaagtctcctttccaaacgtacagatctccgatttttctgccaacaatgataaatggtcagtggcttgccatgttgtctgtgaattacttttaaaatattcacgatcacctgacctaaaggttggtaccaaggaaccgcctgaatacaccgtctctgattatttgcctccaacagagtgttccctgggcctgatctctggtggacaatgagctgctgggaacatcctctcttctctattcctcccctggggatgctgaccttcccttggagtctcctaagttccccagggcagtcggctaatgtcctagggagcttacctgtcttctccataccaagtctcatgtgaaggacgaggctttgcccttgcccagatgaggctctgggggctgagccctggctggctaccagctgcaagagccatggcccttggacagctggtaaatccttgttcccagtcagccctgcccaagatgcctcaacccagccccggcacaggcttcccagggtcacatggagtcaggatcctgggacaggggactggacaggggtttccagggctgagtttctgaacaggggcttcccaggggtcccctcactccaggatctgacatggtcctacaaggaacgtccatggggaggggacccaggagggggaactgacactgacctccccttactgagcctccccccaaccccatcagactgtccttcctctgtagcaagtgcctgcagggtctggatgcaggaaagaaattctgatctgtggaagtttgtctcccctgtgtgtgtcttgcactaaatgtccaaacccccaaatgggatgtaatgtagagggggacacaggcacagcccaggcctgaaaatcctgtgtgtgtgaagcagaactgacccccaacacccagagctcatgagacatcactgtgtacgtgaaactggccagttacttcttcattcacaagatctgtttttatgacttgtagggtgtaggatcctgtgtcattgttggtgacattctgtatcagcagacatgtattggggtatattgtctctcagcctctgtggcaggtcctggggtaattacttgagttcctagtacatatcctgtaattcccctttgtaccagttgtagccaagcctaaggcagattgtgggtgagtggaagaatctccttgccttctgcagcttcaacagtgacttgggcagtggtaggcaagttccagaaagttaaaagtgaggctaggagtggggagagagcatcagttaatactgggccctatgcattgaggtggaaagatggggccctaggtcctggacaggtctcttcatccctcagccttggagtgtgtgtgtgtgtgtgtgtgtgtgtgtgtgtgtgtgtgtgcgcgcgcgcgcgtgcgtgcgtgtcctactgggccaaggtcagcagcatgacctcccttccttcagtgcctctgaccttggcatttccctgtttggagtccttttccccaggggtctgcctggctccctccctactgccttcaggtcctgctcacattagggcatccttgggagaccccttccctgacacctctagagaccctgggtcttccctttctgacctttcgctgctgtgttccctccagggctcttgtcaatacttgacctcacattctagatacccttgcatgtctgtcttcctccctatgagagcatgagctctgtgagaacagggacttgtgtgatcttggttgcaccccagtgcctgggacaggctgcggactcctgtggatgagctcatgagtgttcccagggcccttcacaacgtgggatttattttccaatggctgaggttgttggctaagagctctgttggagttcaatcaggctggtgggaaaaatattagagatagttatagagatagacacaaatcttcttggaagaccaaaaagtttgcataactttggtaatagatctgactgaaggtggtccctttacctttagttaaacaaattaaagtagtaacaaaggaaggcagagtagtttgtctagccagcttgtttactcatgtgatcttaagactaaccattgatgtgccacaggtgcttaattgctttctacttgggaagtccacaatgtcaattaccctctaacggtgttgactcaagcctttgttaattaatcttactgaataaatatgagtctcactagctgatcaaggccatggtcacaactgtttataggactcagcagggagtctgtaagcggccctgacagactcagctggactggcaaagcaaaatatgtgtgtgtcagtgtacactattcacccgtcccccacagctggtgcccctatatgaggagtgctgccacagagctctgtttagtgtcccttgttttttttcttgagtattaccccaacttaaattgtgattattgtcatctgttttcaacattaactgctcagtgatgattcacttggaaaacattaacaatcgagattgtttcttcactaacaacctcagattatttagattttcctgttgtaatcccttcttcctgtttagtgtccaacagaagccctctgtccctctcaggtccccgttctctccaagaaaccccagccagtctctgtgctccctcctcccatccactcccagggagccctcccctcacctgtgagcagaagcgcctgccagggatgtgcactctgtgaggaggggctgagggaggccccatgggctctgctgtctgctttgtcctcctctgtggagaggagcttgggcttcagaaaataaggaggccagaaagtaaggaacaggctgagaaataatggggatgtgtcgaaaggtcacagatgccaacatctttgtcctatgcaatattatccataaaattacaggtttgagatatgcttaaattttcttctaacatgcattaaaataaacatataacttttaatagttatattaaattgtatttaatataaattaaatgctcttgtcagagctactgtgactgtcagctctgctgtccttcctctctctgtgctaagcctcctcccagggcagaagcacttcccagggccaggggtgggggcggggaaaggtaagtggcaatgaggatctgcacaggtagcctttccgcctcctcccctctcagtcctgcctccttgtcttcttttcctctttttctccaatctacatttcagttccttagaccacgctgtgagaagcaaggcttattgggacccccatcccttaacaggatgacctgtgctccccataagtgacctctgctgtgtctagggattggctctgtcagcacctcacagagagtccctggggcccccaaactcagtgttattttctctatgacacagaaacccctctgggtatgcaaggttttcctcatgttttctaatgtctgggaaggttggatttactcccagcagggaggtcacagagatgtccagggagtggggtcctagaaatggacaaatctagagctaaagcccaggtctacgattttcagttgtttttttctgcagtgctatgtgaccctaatttcctaggagtaactaaaatgcaaacctcagacatttgtagacattttatgatttttctctacagcttgtaccactgttattattatttgctttatgctttttcctaaataaatttactttacaaaacatccttgtcctagtagggtgcaggggctcacgtctgtgatctcagctgcttgagaggttgaggtgggtggattgcttgaggacgggaatttgagacaaaacatctttgtcctatgcaatattatccataaaattacaggtttgagatatgcttaaattttcttctaacatgtattaaaataaacatataacttttaatcatcatattaaattgtatttaatataaatttatatacaatacatttttatataataaattatatatataaatgtatatataatagtttttcttttttgagatggagtctggctctgtctcccaggctggagtgcagtggcacgatctcagctcactgcagcctccgccttctgggttcaaacgattctcctacctcagcctcccgagtagctgggattacaggcgcctgccgccacgcccagctaatttttgtacttttttagtagagatggggtttcgccatgttggccaggctggtctcaaacacctgacttcaggtgatatgccgcctcggcctcccaaagtgctgggattacaggcatgagccaccatgcctggcctatatattttatataattatataaagttttctataataaattttatataataatatataaaatggatatttatttaagataaagttattagttttatatatttacatatatttaggaataaatgtgttactgtgggagcccagtgcccaggcaggtagtcagtacatgatggttgtcattagggttaatactttggaattctggattttttcccaagagagtgtctacgctggaatattgggcttgtggctttctgctgatgtgcatgtgtgaagaagctacttccacttattaggacttgtgtatctgtctcgcagtttcactacctattttctcgtgatgttggtcaagtcgcctaacttttctgtgcctcatttacctaatttgtagaatatgggtaacagtacacaagtgtgagtgtgtatttcccaggactgaccactagagggcgtgaaggcaccggcacttactattacagcaatgggtgtagtagtgctcatggtcgtaaacatcattctcccatgaaaggaaccagggcttcctgggagaaataactgattccagggctggggccggaaagcacaagcggagcctggagcatctcgtgaggccagaaagtaaggagccggctgaaaaataatggagatctgtcgaaaggtcacagatgccaaccagaaggagctttgaatgaccaattttgagacaaaatgagcactataagaaataatgatagtaataaattccaacccataaatacccatgagttcctactaatataaataaataattgaatacataaatatataaggatgaagaaacagctttttcttacagcagaattccaattaatgaatgtagaaggaatgatcaaatagaaaatcactatttggctaacagcacagtcaattgtttgtaggcaagaattatcaatggactttaaatatgaatgggtaaaagtatgatgatgctacaactagtgagtaccaagggggaaaaaaaagtacgttgagaagaaacaggctacttccatattcccaaagtatcacttcaggagctacttattgattataatgggacaaatagtaacttacagtagagaaacctggcaacagagtctctccgaggtacaaaggctctcttcaggaaggaggtaaggggaaggaagaagaaaacactgtcctgcctcaattatttgctttccccattctcaagtgtacttcatagacattcaaagatatgtgttgatagtgtccacgatccacatggctctattatagtcatttattcacacatacattcagtgaggctttgagtgcctaatgtgtgcctgatatttgctagatggtggatgctgagaagatcaggtgtgctgctgtctctagggtgactgaatccacctgccccactttacagatgtggaaattaaagtgaaaaggatttataggattagttcactgtcacaaggtcactagccttaaagttacaggagtaaagcaagtttcctgacttgctagattttctgctgcaggtgctgacaatggtgagctccaataggagagaggacactcagagtgaagtgggagccctgaacaccctggattagccaagaggacatgccgggtccagctgtgaccgcacaaaggaccattggggatatttgtattctctttttcacttagagcttgaaatgaggaaaactaagtgcagaaaaccaagagtggaagatttttcacaaagcactggtaacatgcatcagaaaaccctgtgctgatgtctgtcacggtgtttctcactgaacggtaatagtctggctttgagtgtgttccctctacagcctggagttctgcgaggcagggaccaggtgtgattcatctttgtctctccagtgacagtacacagcaggctctgataaatatttcttacaaaataaaatggaataaaaagtagacatctgcacaggtgtgggatgactgagcagcagcagaagcaggaaaagtcagcgtccccagatcagctgatgtggtgttcggattctagataggggtgaggtgccaggatggggatgggggtcctgtggctctgctgccctgggggacacccctaggtttcacagtgcctgctgtggttgctgcactttgcttccccatgggaaagtgatcagagggtgtggggcttcaggtgaccccatgtgggaaatggccaagggaaggtggggtgggcggcacatggttttttttaaccaatatttgaaggtaggttgtatgaaaaggtgttaggcttatttcagcttatggggagtaggacagggattggtgagtgtgtatcaggtatattttggctcaggatggaaaagaactgtcacagtaacataaggtcttttgggaaattacatgtttactggcagagttcaggccagggctgggtgtctgaaaatacctgtcagggtcacttttatggttacaagggcagagcttggcttggaaccaggtttcttactaataccacatattaagtattataaaaactgtcctttgcaataggacattgctctatgatgcaggttgaggtccctctgtttaagtaattgtgggtggctgtgattctctcatctagtctgcgacttggacttcacctccatctgcagtccctctcctttgctgttgacactggtcagagttaagcgcatttactgacgatggtcacagggtggcagcactgcctctctggtattttctaaaacctcttcctggaactgagccagtctaagaggatgtcatgactaagaaaagggcactaatgaggtgaacagataattttttttttcttgtttctcctgtgaagtaacagagtggaggtgagcatggaataattgccttttagaaatggaagacaatggagagaagtgtttcgcaaaccttaatgtgttcacagatcccacacagatctttttattcaatacagattctgatttttctggtgaggcctgagattgtgcatgtctaaggagcttttggatgatgccattgctgctggttggcggaccacactttgagtagcaaggctcgaagatcatttagaggttaattctcactgcatctaatttatggatgaaaacaaaccaaggtccagagagagcatatacagcttgcctaacaaagccattccctaagtgcctgacttcttgcatttaaacccagggcttcagcctttgtccagttctcactccacacatcacacggtttgttcactgttgtgaacgacagttgtggcagcatctctttagtttaggaatccagagccccaatttcactaccctctttggtcttggctcatgctgtgacttcgaatagttttgcccttacttaaaatcttcagtggctcttttgtaatcacaagatcaagttcgaatatctctgtctagtgttcatggctttataacatatggtatctctttagtaaccttacctaacttccctgttttaaaattgtctcttgctgccatagccctccttgctccttcctgctccctaacaaactgtgttcacttctctctcagtggtagtgatgatggcatggcctctgatgttagactcatgtaacttctaatcccagatccaccaccaacattggcaagttgattcatctttctgaggataagcatcctcctctgaaataaacttagatggcggttgagaggggtaaataaaataacacacaaacccactctcatccctgagaccctcttcaaaactagcatataaaaatagctatttgaagaggttcagtgaaattcaaggtaacacagagaaggaattcagaatcctatcagataaatttaatagactgaaataatttttaaaaatcaggcagaaattctgtagctgaaaaattcaattgacaaaccgaagaatgcactaaatctttcaacagcagaattgatcaagcagaagaaagaatttgtgagcttgaagagataatatatgaaaactcagagtcagagagacaaaagaaaaaagaattaaaagaataatgcatgcctacaaggtttgattattaagctactcaaagagatacaagagaagggtgaaaaccaacataaagaaatgtaaaaaacaatcagaatataaatgaaaaattttctaaaatgctagctagtttttttttgagacaggctcttactctcatcacccatgctggagtgaagtggcacagtcatggctcactgcaggctcaacttcctgggctcagatgattctcccacattagccttccaagtagctaggactaaaggcgtgtgccaccaggccaggctaattttttgtatttttagtagagatggggttttgccatcttacccagggctggtcttgaactcctgggctcaagtgatccaggagattcactgccaaaaaggatataaccaagtcatatagtcataggttatctaaagtcaatgtgaaggcaagaattctaagagcagtgagacaaaagcatcaattaacttataaaggaaaacctatcagtctaacaccagatttctcatcagaaaccttacaaaccagaaggtattggggtcctaatcttttggcttcttaaacagaatagctctcagccaagaatcttgtgtagagtgaaattatatttcaaaatgaaagagagaaatacagtctttttcaggcaagcaaatgcttcaggatttgtcacggctagaccatcctacatggaatgttaaagggacttctaaatcacaaaacaaaagatttaaatagaacagaatagaacctcttgaaaccaaaaaattcaaatggcctataaaacaataacacaataagaaaacaaagtagataacgatcaacatgatgactggaacaaatattaacattgaatgtaaatgacctaacactccacttaaaagacacagattggcaagataaataaaaaatcacaaaccaaatatcagctgtcttcaagagactcacttaacatgtaaggattcttatagactcaaggtaaagagatgataaaagatattccatgcaaatggaaaccataagtgagaaggaatagctatccttatatcatataaaacagactttaagcaacaacagtaagaaaaagacaaataaggcaactatataatgataaaaggatcaatcaaacaagaagatattacaatcctaaatatatatgcacctaactttggagctcccacattcataaaacggttatgatgagacctaagaaaaaagatcaacacaaaacagtgagggtgtcctgggttttctttttattggacagcagtgtactagcctatcactttcccagtcaggggatttttggtctccccattcccctaccatgggttcatgccaaagtccatattttttattagtgtttggaattggattttttttttttgaggtggagtctcgctctgttgcctaggctggagtgtagtggcacgatctcggctcactaacctctgcctcctgggttcaagcaattcttctgcctcagcctcctgagtacctgggactacaggtgcatgccaccacacccagctaatttttgtatttttagtagaaacgagatttcaccatattgtccaggcttgtatagaactcctgacctcatgtgacagggaaacaggcactcagtgaacttcatgcgattgaggagttaatgataatgagagaagggctgtgaggggacagcactggggacaccagagcctgtgacgggctgagttgctgtgccttgggagatgcccttttgactgagccctgggaaggagggggtgtgggggcaggagctgcctgcagagggagtggcctcaggtgggcggccacctggctgcagggaagaggtgacagagttcgtgtgcagagcttggagggtgaggaggaggtgggttgaggtgaccttggtgagggtgaaccatggggggctgtgggccctgctgagggaggccagccagccctggacctacagggtggtttggtcttttttgtcccattcccagcatccactgagtggtgaaactctgcaggccagggaccatcccactggccagaaggagcgcacagtaggtgcccactcagtgcatgttgggctggacagaacctcactctgccccctgcccccagctttgggagctgcagcaaggtccctccccctagggatctccatgcctctgtctctgaggggtgagatggggagacttcaaagggccatctcagagtgtgggggatagagacgcagaagtgtgggggatagagggaggcctgggctctagacccaaaggaccttacacacctcctgagtcttttcaaatggtttcttctgttactttaaaaatgatgtaagtcatcatatttattgtaaatcccaggaatctaatcatgcgtaaaataaggtgtcttatccttgaccccaccccttccccaattaaatttccaggatgttaccactgtttgcagttggtgtgaatctctctttaataatactctgtttatctcacttgtcgttttacgccaaaatacccattgaattatattattgctgaagaccattcttttttttttttttttttttgagatggattcttgctctgttgcccaggctggagtgcaatggtgtgatctcggctcactgcaacctctgcctcctgggttcaagtgattctcctgcctcagcctcctgagtttctgggattacaggtgcacaccaccacacctggctaatttttgtatttttagtaaagacagggtttcaccatgttggtcaggctggtctcgaactcctgacctcatgatccaccctccttggcctcccaaaatgctgggattacaggcatgagccaccacacctgcccagaccattctgttctactgaatcatgtgtggtgggcacctcttatatcaatacatatggattttatcttgtgtttgttattggctcccctttttctcattgcatggctacactcaatgctttgtccacacccctgttcctgggttggaatcttgtgacagaaaatgaagtaacaaaggctaaagctttctaaagtggagtcaggagattgcaagacaattgcactttcaccagcaagagctcaaaccacagaatgttccaatagatttggataaacagctgaagtcagtattcaccagccttcaacatctcaactaggagaaccctaaaattaactaagcacatagaatggaatggacttgtgatttaggattccttctcagccaatgagctgcttctgaaaacaactttttgtggaaattacctgtaaagaaaaccctctcctgtgcttgtcttacagaacactagtcagggctgccctgattcagtggacccgaattgctattatttgtttcctaaacatatggtattttctgtgaccttcatctcaatcttttttttaagttactgggctgtttcccagttttcataatgacgagacattctgcagtgtttcatacacatgtcttttccccatgtggagtattgatccaggagctcattcagtcaacgcatgtttatgaagcatcctgtgccaggctgtgggctggtcactgtcttcagcagagagaggacaggcacagtcttgccttcacagagctcacagctcagggaggctcttagaagtgggatactggtcggagcatgtgcacattaaacatgatgaggtcaaggttgctatagggactaaaccacagtcccaccaagatcgcattgagttcctgtggtagaccagaggtcagggcccctaagatgtcctgagcagctccctctgctcagaagttttggttccacaggtgacacacctgagcacaggtgacccctgcagaacctgtgattaccacccaaagccaagagtgagtggtgggtgttctaggaggaaccgtcacctccatgggcagggttggggaagactgaggggagcaggtggctgatgactttggccagaaggtagggggatgggcaggtgtgcgctcatagggaagggaagagaagggagggcattgcaggcaacaacacaaaggttggaacctgccttcatggactgagaaaagcagggagtccacccaggctgcagctggggagggaagacatggggagcagtgggtctaggggagaagcagactgcgattgaccttggggactgggcagtgagcagaggtgtgttatgtgtgtctgtccccatcatagatatgaggaggggtgaggccgcgggtggcacctgggtcggtgggatttcatagtgcctgctgttccctagagcctctctgtatagagggtcagaatagatctgaggctgtggtctgggggaaggggctggtggtgcttaccatctctaggggtgggaggagagggatgaggatgcccctgagcagtgaagcctcaaggtgtgtggagccacagttgtctctcattagacatgtgttttgcgtgaggatgccagggcctggtggttattactgttgtcaagtttgcatgacaaggacccaggtatccagggatccagagcacagggcccctggtgaggggatgaggctcagatggggctgaccaggttcatgtggtcagagtgggagggactgatggagagacagagcctcaacccctcctgtcaggagctgtggctatgtccaggagagatgacaaggatgacccaggacattgagtgagtcattgagacattgaaggtgaggacagggcagagaggaccctggtgactgctgaaatgtaggatgtgaggagggctctgacccatgcaagttacaggacctccccacccccgagcccacagatgacccttaaattgggcatcctgagtgctgtgtgtgcccagcagggacactggataggctggacctgagtctctgtaagggcagcgctggtctgtaggaccagagtcttctctgtgggtgtgacgtgggcaggaattagcaagatgggggtgacaaggcttggcttggaggatctggtacagaagcccatgggcttggtcagctcagcttctcaggggctcagctggggctggaggagcaggatgctgtgctcagggcatgctccaggcagcgtgatgtgtgtggttccagggtcaggcacgggggtcaaaaattaaccatgaaaagttcccaccttctgtaggcagagaaaatggcctgattgtcagggtcagggagacttaccatgtggccaaagcaggctctcagcctcccagagaccacaccctgggtgcagcactcagctctgcagggtatggcaatagatgtgccaagaaccccaacatccagatgcatgcaaaaattttgcgatatataaaatagagcagatcaagtttccctgcaataacgttgttcctggttgtgtctttttcttgtaaactagacatggacatctttccagcagtctgttctcatctgccaccttcctgctgcagcacctcagaatgaacattcctgagacactgtccgtggtgctgacgaccaagagctatggaacagagtgtgatgtagaatcttctagttacctctgctctcctttcacttttaacaacagagcatcattaacaatgagaaggtggagaggtgttcaggatcttgaagtgacttctgtcttgctctcccataaccctgaagctgctgtagacattattgcagaaactgacaccacagtcaggatggccttgtccaggagcccatgtgcagtttgtagtgagcaaggatgagaaaatggtcttgaaaggggtgatggacagaacaggggcttttcaaaaatgtcacatcatcacccccagcatccgtgaatctgtcacatggtaagagaccttacagattaaatgaaggattatgagtttggaagattattgtagtttatccagatgggtccaacataatcacagaatcccttccttacaaatgagagagggaggtgggagagtcagagaaggaggaggagatgtggggatagatgcagaagacagagcggtgtcaagatgctgcactgctggctttgaagatggagaaagaggacacagccaaggatgcaggaggcctctaggaggtggaaaaggagaggaaacgcactctgccctggagcctccagaaagaacgcagccatgtgggcaccttggttcaagtttctgtgtcacttagcttgtgggaatttgtcacagcctcaacaggaacctacagaggagtcaccttgtgtgcaggtgggatccagggtcatttacagctaaatcctgatgtaaatattgcaggttgcttttcctacttcctatctcatggccaacaaccctggacaatggcagaacacccttggaaaccacggctctgtgctttagtggagggaccagcttgtttgtgggaaggtagcacctggtccaagtgaacctacatgagatcgttactctccccagggccctcagggaagggctgagaacagctggcccaggtgtgtggaggagctgcaggtgaggcagggctggaggggcctgtgggtccaggtagaggggcagacaggttgtcccatcgccatgggagcctgcacgagctttaggttggggaaccctgctcctctgacctggacgctcctgtgtggagaggaggcttgctcagtgagatccacgccagggggtaaattgggaactgatgggaaatgaggggctagagtcctgggtagtgcctgggaggaccttgctcaaggactgaattcttggtctgttcccaccttggttactctgacaacccctctctgtgtcccacggggataaagatctcctgagcagtggccattgggacagaggagaacctggtggccagagctaagcatccaggatcctggatttggggacaggcaagctcattgctgggggacagtgatagatacggcctccagggcctgggtgaagagagcaggagggctcaggacactggaggctgtgtggaggtcacacccacgatctgtaccacccatggatgctcctgcattgctcacctttgtgtggacatcagatggccccaacttttgcactcctgagacatctcatgcattcacagagggacccaggctggggctgtgcatggccttggtctctagggtagtgtgaggacagctgagcactcagctggctgggcaggactcctgcgaatcctgccctttcctgtgtagggtccaccccagcctgactcctaaccccctactcctgtctttccagggaagagagactggggttgagataaggtggagatatttttcctgtgtgacccaggagagaatggacatggagtttcaggtgagtttctgctaagttcccatgagcagaaaaagagccaatgagaggaagtttcccctttattcagatcctttccaggtgaccccgggtgggccataggcccattcactttccctgcaagcccccgcttcctgtggtgatgggaagccttcgccttggcccacccagagcccggggcagtctgttgaggtctctatatattcagcagggacccccatcccttcctgtccccaggcctgtgtctcctcaggactcagagctggttctctggctcaggctccatgtccttccccatccccagggctgggggcttcagggacgctccatcaacccacaggagcagctcccagaggaacctaagaagccacatctgctttgtggtcgatccagcagtaaatgtttgtgtcagagtgtagcaattccagtaaaaacagagaagaggtcttgacccctgaggccttctcagaacagggtctggcatctctctctgggcccacccagggctactctgggactgaacctggctgtgctcagggggttcctgctcccaggcccctccctcctctgctcaccacctcctgttattttcactgcagtttcctgaacttcagctcagccagatgccagtggggacagatcctgggtctccctggggcccaagggaccagaatatctgtggcccccactcacctcatagatgagagcagctgccctggtgctgggtaggggaatctgggcaggggagagaggggtgtcaggggacagggaaggattcctgctgtgtaggaattccagggctctcctcaggtgatggagggtcccagggtggggttagcacagggagtggatgatcctggccctgaacagaggcccagctcatggccagggcaggtctaaccttatccaagtcattctgggtagggtgggtttgtgctggggattgacagtccccctgccctgagcctgcacagctggggccccagtggaaatgggattgggaacggacagtcttacctaggagatggagctgtcagagggtccatggcctggggacagagacaaaagtgagcacgagagtgttaggatagctgggcccctcctgcaagagtgtgtgggggtcctcagttcttagagaattggggagagggagcctttctcaggttattttaggggtcaagtaagcaagtgaggttgaggaagtgacccatgacccagagcccggaggttagggctgacccggccagttggggtttcctgtgtgatgttttatgggatcctctttgcagccccagggatagggtcagaggcccctgggtgtaactggcaggagtggacaacttggggctggcttagtagttcccagccacacccagactgaagggacactcaccgggggtggaggctgggggctgctgctccctgaagtcactctgatcgctggccctaggaaaggtcagggttatttgtgaaggtgcaaggttaaaagtcacaaattggagttaaaataggggaccaggaaaggagcctatttccaagaggggtatggagacctcctttctttatggagttctgtggtaggaggggcccaggtgaggggagttgaggaaaggccttacaaagccacatctgtcctggccagaggggaaggactctcaggcagatgctgggccaggagaacattgatccagtgacacaggaaagggactgaggacccagggaaggaatcagaccaccaggggttgcctgagaggaagggtcaaggcaccagggggaaagcagggccaggcacatgtgcaggacactgaggggactgcatgcatcttggattctcctggaactcagtgtccctgctgtgaccagacactccactcagggctggagatgctgaaatgggacaatgatcttgtcttctgtctctgccctttggcaagagacataaacgacattccaggatatgccatattggggccccggttctcccttctcacagctcagtgtctgcagttaccatgtcagtcaaaggggtgctgaccccacccagcccgtccaggctgttccagtctccactatgtgataatgcccaggatcccccctcagatgccctctcactgggtggatggattcagtgaacagggggaggtaccaggtattgagcaccgctcccccctgctccaggcagctgtggctttgctgtgctaggaaactaggaccatgctcaggggcatggccttaattggactgaattcactgaggacaaagctgttgaggaagcagcccagggtcagcagctggtgaggaaggtgccatggaatgagagggaaggatccctggggagtcgggaggctggggagagcctggcactgaatacaagacagggtctccttccttctcgcctggggtcagcgtgaaggatgggagcagaatggggaaaagctgtggtacctgccagtttttcggaggagcaggaaacacacaagtgcagccaccagaagactcccaaccaggaccccgatcaggatgcctagagtgttgtcatctgctgaaagaagaaggcaaaggggatgaggtccaaatctgttccagggggaaccatgaggggccttgcagggcaggggcatggtcagggaggaaggaaatgccatggagcctgagtgtggtctgttgtgctgtcctcatagctggctcccttgctctccgtggttgcaccattttctgtgtcttaggcttgaattactgggatgcatcaactcctacattctcccacaggaagcctgcacctcatcctgctcctgtgttttttagtccctccttcctctcacatcactcctcttccccctgtttctttttttccatcccatggcagtcgtaaagggcaggcccttgctgccaactcaatgctgatgagcagggatgatgttcattgactgttttcaggggccttccacatggaaggcacagtgggaatcaatctacctgcagcttttctcaccctcccattgccttgagggagaagggtatgtgatattgtgaaatacgtatttggtgttcatcaccattgatatggttaggctctgtatccccacccaaatctcaccttgaattgtaataatccccatgtgttatgggagggaccttgtgggaggtaattgaatcatgagggtgggttttttccatcctgttcttgtgatagtgaataagtctcaggagatcagatggtttcataaagggaagcttccctacacatgtcctcttgcctgctgccatgtaagacatgcctttcaccttccatcatgattgtgagacctctccagccatgtggaattgtgaatcaattaaacctctttcttcatacattaccaagtctcaggtatgtcttcattagcagtgtgagaatggactaatacagtaaattggtaccagctagtggagtgctgctataaagatacctgaaaatgtggaagtgactttggaactgggtaacaggcagaggttggaacagtttggagggctcagaagaagacacaggaaaaaagtttgaaacttcctagagacttgttgaatggttttgattaaaacgctgatagtgatatggacaataaagtccaagctgaggtggtctcagacagagatgaggaacttcttgggaactggaacaaaggtgactcttgttatactctagaaaagagattggtggtattttgcccctgccctagagatctgcagaactttgaacttgagggaaatgatttagggcaactggtggaaaaaaaattctaagcagcaaagtgttcaagatgtgacttgggtactgttaaaaacactcagttttatgtatttacaaaggtatggtttggaattggaacttatgtttaaaagggaagcagagcataaaagtttggaaaatttgcagcctgatgatgcaatagaaaagaaaaatccattttctgaggagaaattcaagccagctgcagaaatgtgcataaacaatgaagagcaaaatgttaatccccaagacaatggcaaaaatgtctccagggcatgtcagagaccttcctggaagccccttccatcacaggactggaggcctaggaggaaaaaatgtttcctgggccaggcccagggctcccctgctgtgtgcggcctagagacttggtgccctgcatcccagccactccagccatggctaaagagggccaaggtacagctggggccatggcttcagagggtgcaagccccaaaccttggcagcttccatgtggtgttgagcctgcaggtgcacagaagtcaaggattgaggtttgggaaccttcgcctagatttcagaggatgtatgaaaatgcttggatgtccaggtgaaagtttgctgcagaagcagagccctcatggagaacctctgctagggaagtgttgaagggaaatgtggggttggaaccccgacacagagtccctactggggcactgcctaatggagctgtgagaagaagaccacaatcctccagaccccagaatggtagatccactaacagcttgcaccatgcacctagaaaagctgcagacactcaacgccagcctatgaaagcagccaggagtggggctgtaccctgcaaagccacaggggtggagcccaaggctatgggagttcagctcttgcatcagtgtgacctggatgtgagacatggatacaaaggagatcatttcagagcattaagatttggctgccctgctggattttgggcttgcatggggcctgtagcccctttgttttggccagtttctcccatttggaatgggtgtatttacccagtgcctgtacacccattatatctaggaagtaactaagcttgcttttgattttacaggcttataggtggaagggacttgccttgtctcagatgaaactttggacttggacttttgggttaatgctggaatgagttaagactttggggaactgttggaaggcatgattagttttgaaatgtgaggacatgagatttgggaggggtcgggtggaatgacatggtttggctcttcttcacccaaatatcaccttgaattttaataatccccacgtgttgggggaaggacccagtgggaggtaactgaatcatgggggtggattcttcccatgctgttctcatgatagtgaataagtctcacaagatctgatggttttagaaaggggagttcctctacacatgccctcttgcctgccgccatgtaagacatgccttttgccttctgccatgatttcaaggcctccccagctatgtggaactgtaagtcaattaaacctcatttttaaaaaaattacccagtctcaggtatgtctttatcagcagccaagaccagctcggtcgcggagatcctaacccagcagtgctagaggaattaaagacacacatagaaatatagaggtgtgaagtgggaaatcagggttctcacaggcttcagagctgagagccccaaacagagatttacccacatatttaataacagcaaaccagtcattagcattgtttctatagatattaaattaactaaaagtatcccttatgggaaaccaagggatgggccgaattaaaggaataggttgggctagttaactgcaacaggaacacgcccttaagatgcagattgctcatgctattgtttgtggcttaagaacgcctttaagcggttttccaccctgggtgggacaggtattccttgccctcattcctgtaaacccataaccttccagcttgggcattagggccattatgaacatgttacagtgctgcagagattttgtttatgaccagttttggggccagtttatggccagattttggggggcttgctcccaacagactaatacacccattttctggtatgtgactctaaagtccttagaatcttcaaagtgatgtctttttcaagctaataattgactgatgactggcagcccctaggcaacttcagaatgaggctggtcactgacccaggtaggattagagggttgggactttcagcctcacccctaatccctggggagggacctggagtttgaattaatcaccaatgaccaatgaatcaattaatggccaatgattgaatcaattaatggccaatgattaaatcaatcatatctatgtcatgaaccccaaaaggactgggtttgaagagctgaacccatggaagtttctggagtgtggtgcatctggggagggcatggaagctccacaccccttcccacatgccatgctctgtgcatctcttcatctgcatcctttgtaaagtcctttattacaaaccggtaagcctaagtatgtgtttccctgagtcctgagagctgtttgagcaaactaatccaacccaaacagggagtcatggaaacctcaatgtgaagccagtcataagaagctctggaggcccagacttgtgactggtgggaaggtggtggcaattttgtgggactgagccctctgctgatatgtccaggtagatagtgtcaggatggaattggaggacacctagctgatgtacggtgcagaactgattggctgctgggtgtgtgggagaaacccccccgcatcacatttggtcacagaagtgtgtctgtgttgatgattgttattgtggagtgagagcagaggaaaaacacagtttgagtttttccaaacagggtggaatcccatctgccaatttagaatctgaaacttatagtttcagtacttcaattaagattgaagtacttcaattcagtacttcaattaagattcagtacttcaattaagattcagtacttcaattaagattacagaactggtaagtgaaagtgatacaacaaaaatgtaaccaaagtctgctcaacttaacagctaataacaacaaagttcataaaaataataccagtcgatattgatagcactgattgagccctggctctgtgcatgaccttgttaagggctttaatcgcattaatctctgaataaatatcctcacaaccaccctgagatccaggtgtttgtaacaattctacagatgaggaaactgaggcccaggaggttgagtgtcttgcccaaggtcaaatacctggtacctattgtaaccaggatgataactggatgagtctaatccctgagttcttacccacattgctccccaggctctgaaggaatctcatccttctcattccgtgtatcattttacaccccccctccctcctaggaaaatatacaaggaaaggagtgagaggggccgagggtcactcacattttacagtcagcttgagggggtcgctcctgttggagctgactgggttggagacctcacactgatactccccagcgtcctcctgcctgatggggtctatggtgagcatatggttaaaccaggacagcttcatcctcttcgtgacctgcagacgctggttgttgaaaatccactggaaagaggttccagtgttatttgtgtggcaggtcaggaccacggagcccttctctgtgactgtggtgctgctggcttggatggagggctgagccactgactctgtggatagagtgaccaacagaaagtgtcttggggccatgctgcatcctcagagatctcagagtcaaatttagaacattctcctgtgaataaaggagaaagatgaaggacagggaggagcagagagaaccagagacacccatagcagcgagcagtagggactacagtgacctcagagaccccagggaccaggaggacccagctgcctcagaccaggaccagggagccctgaaaaccctcccacagatgagcggccccagagtcacatgagatgcaatacctggggtggctttaggagcaggcagtcagagaaatggaacatgggtctcagcccctaagggacaaggaagaggtgtggccagctcctcctaggatcctacatccaggacccagtctgtaaagaggttatgattattcctttcttttttcattaattccctccctccttcatcagagaactactgagtgtgtgtctcagttgggccttgtgcaggtacagggtgtagtgggaagagaaagctgagtcctttccttcatcctcccatgggagtgacatcaacaaatcaagaaattcatgatttcacgtccagtgagggaagaaatgtggatctgatgggagaggcttggacaatcctggcattgagtctgatagttgagacaggtgatttcgttctaagtaaaaactgactaattctccatttgcccgtcattcctcagaccagaatctccctctctgagctgaggatgcccaagaagaaaggagctgaaccaacatctggtcctggggtccacagatgccccacggtggtggccacgaccagattctgggctgcagacacacggtggtgtgacgttgagcactgacagcctgtgtgatgctgatgcaatttctctttaataaaatggggtaaatgtcaatggtccctggcttgccatcctctctgtaaattaacattaaaatatttacaattacctgacctaaagcttggcacagaatagctccaaataaacatcatctattattattttactccaaaaaaaaaaaaaaaagagttctctgggcctgattcctggtggagaaggagcggtccagagtgtcttttctctgctttccctcctcctgaggacagtgcacttcccgggacatcttttaagtttcccatccagtttaatggcctgggaagtttgtttgtctgtcctctccactctgactctcaggtgaaagatgaggctctgcccttgcccagatggggctctgggggctgagccctgcctggtgaccagctctaggaaccacggccctgggacagctggtaaatcgttgctcacaatcagccctgcccaggaagccacaacccagccctggcacaggctccccagggtcatctggagtcaggatcttgggacaggggcctggggcaggggcttgaagggctgagcttctctcagaggatcctcaggccaggccctgactgagtcctataagatctttctcaggtcatgtctatgaggaggaggccaagcggggttggactgagactgattttcccccgctgcatctcccgcatcagactatccttcttgctgtagggaatttccacggagtccggataagggaaaggaattctgatctgttatagtttgtctcccctgggtgtgtcctgcactaaatgcccaaaccccaacatgggacgtaatgcagagggggatgcaggcacagcccaggcctgacaatcctgcgtatgtgaagcagaactgacccccaacacccagaggcacggaggaatcactcaccgtatacacggagatggtgagatgcctgttcaatctgagaatttctgtatgtgacttgtagggtgtagtatcccgtgtcctctagggtgacgttctggaaatgcagatctccactgggtgatattgtctctcgaccgctgtatgcaggccctggagtcctaacgtgagtgtctattacatatgctgcgattagctggttgggctccaccgttttccctttgtaccagccatagctgtaaagattctcgggcagataaaccacagagagatgaacattctccccttcagcaacttcaaagggcgctgatgcaataaagagccaggcagtggtgggtgcgttccagaaagttaaaagtgaggctaggaaagggagagaatatcagtcaatatttgacctatgcattggcatggaaagacggggtcctgggtgcaggtctcttcacccctcagccttagagggtgtgtgtgtgtgtgtgtgtcctactgggtcaaagtcagcagcatgaccctcattccttcagtacctctgaccttggcatttccttgtgtgaaccctctttcccaggggtctgcatggttccctccccactgccttcagttcctactcacacaagggaatccctgggagacttctttcgtgaagcctcctctagagaccctgggtcttccctttctgacctttcccagctctgttccctccagggctcttgtcagcacctgacctcacattctagatctctttgggtgtctgtcttcccccccatgagattgtgagctctgtgagggcatggacttgagtgatgttagttgcaccccagtgcctgggacaggctgcagactcctgtggatgagttcatgagcgttcccagggccttccatatcctggggtttatttgctaatgtctgaggttggcagatgaagacagagtttcatgccctggtggtgtttttatttaaattgtcactgtgatatagttttactatcattttcaaaatgtagtggccactgacaatgaacttgaaaacatggaccaactgagattgttttgccccttggcaattccagttcacttagattttttggttctccttagacgctctctcccctgagtctctaacaaaagccctctgtctcctctcagagccccatcctccccaggagaccccagccagtctctgtgctccctcctcccacccactcccagggagtcctcccctcacctgtgagcaagagcccctgccaggggatgcattctctgtggggacaagctgaggggggccccatggtctctgctgcctgctctgtcctcctctgtggagaggagcttgggctccaggaacgctctagacagggttactgtgactgttgtctctgctgtccttccttcctctatgctgagcttcctctcaggcaggagcacttcccgtttatgggcaagggcggggctctgcctacaatgtctctctgtcccctcccctctcagtcctgcctcccttgtccctcctttctccttcctttttgcctatatttggttccctaggcaaaactttgagaagcaacgctgatggggtcctcataacaggacgacccactctccccagtactgacctctgctgtgttctggccttggttctgtcacagccggtagattatttccctttgtgacacacaaaaccagctgggccctgggtctcctcatgctctccagtgctccaggaaggcagaatgatgcccagcaggaaagtgacagaggtggctctgggggctagaaaggggctcactgggtgatggctgggaaggacccacccgctatcttcagtgtcaccagcctggcctctgacccagggacagagacccaggcctggaggtctcgggaggatccccagctcctaggtgtggagggaggtgtcctgtgtgtcctgggaagagaggactttgatggaaggaggtgggaggctctgggttctgctgtccttggtgaaggtttcagggggaccctctccatgtctggggtctgtgcccccagcttaactctcattctctttgcaaatacatatattttgtggatctgcagttgcctgaactgtctcatgtccctaaatctttgtatccctttttacagaaggtcaggaagggtgtgtacatgagtatgaggactatctgatcagggcgagtgtttgtttcccaaagatctctttagatatggtataatacataagataaatgtactgaattagcaattttaagtgtagaattaaatgatactaattctattcacaatgttgtacaaccatcaccataattttttaccagaaaatcttcattataccaaatggaaacttcatacttttaatcaataactccccacttccccctgccccacccactggtagcctctgatactatcaatctctgtgaatttgcctagtttacatgtctcatataataaggaattatatacgtgtattatttttttctggattatttctcttagggtaacacttttaagattcatccacgtcgtagcatatattacagcttctttcctatttatggctgagtaatatcccaatatatgtttatacctcaattttaattcattcatctcttaatggacatgtgggtggtttccacatttttgctattgtgaaaaccgctgcaatgaacttacacttggaagtatctgtttgggtttctgtgttcatttctttgggggtacatataggagtataaatatggggtcatgtggtagttctatgtttaagtttttgagaaacagccaaactgttttccagtttgctgtgctattttatattcccatcagcaatatacgagggttccattttctctacattcttgtaaacacttactatttaatattttttaaaacttatagccattctagtaggtgtgaagtgatagctcattgcagttttgattttcatttccctggtggctgatgaagttgagcattttttcatgtatttactgacaattttaatattttttagagaactatttattcaaatcatttgctgtttaaaaaaaatgggttatctttttattattcagttgtaatagttctttatatattttagatacaagtcccttatggggtacatgatttgcaaaatttttctcatattctgtgtcttctcactttcttcatggtgttctttgaagcacaaacatttttaactttgatgaagttcacttatctatttttaattttgttacttatgctcttgatgtcatattgaagaaaccattgcccaatccaagatcattaagttttactcctatatgttcttctaatggtttgataagttttgctattccatttaggtttttgaaacattttgagttaacttttgtatgggctgtgaggtaggggtctaactacactatctcgcatgtggttatccagttgttccagcacaatatgaagaggctaccattctttccccattgaggaatcttggcacccatgtcaaaaaccaatgggctgtaatggtgagggtttatttctggactcttgattctattccattgatctctatgtgcattcttgtgccagaagcacactgttttaatgattgtagtgttttagtaagttttcaaattaggaagtgagtcctccaatttttttttccagattgttttggccattctggggtgacttttaaaaaagatgtagttcaatggttctcaaagcaggagtggttcagctctccttttttggcagtctggagacctttttaggaccttaatctaagtagataaattattcccactttcttttctgagttgctatgttacagtgtatattgacacccatgaaataattgagagaccctggaagtgcttgcctacatagtgagggacaattagttccatgatcatgggcacagaagattttgttttgggaaacaattttgttggtggagttatattcatgcttactcttttatttgtcttcatagcctgcatctccttcagacttcatatctgtttattttcttgtttgtcctctggggtttgggtgttgggtgaccagtcagctggagctggaggaggtgcttagcaaggcagtgaccctggttgggaggagcagggctcagcagggtgaaagtagctgggccttgagtcaggagtggcatctggaaggcctgactgtaagggtcagaagggccagcaggtgggtgtcctaggcacaaacggtggctgctgctgtggactggaggaaggtaagaggccccgagtattccatgttcttactggctccccaactgaggattcctctcctgggctggtgctgtcctgcagcagggaggggttagacagggacggctgcacatcaggccggagtccatgtcatcctcttaggcactgtcactacagattgaggattctgttcataagccaagcctttgcacaaggaagggacccgggctctcaaggaagagcagctcctggtcagacctccatctccttctctctcattgcctgaggcctcaagcttggtctacctggcacaggggtctggatcctcctcccagggttggggtcttactgagctgggcacctgcaggtgggagaagatctggaggggccccatctgccttcaccagattgatgttgagggtccctgagtcctgcaccactatcaggtgctgagcaacttccagtgtcagtgacaaccaccccatggtggaagcagaaccacctcgtgagaaagcacctccaagcctcagtgcttgccatgtgtgggaatttgctggtttcagttgggggcatgttggtgggtggtcatgaattcagggccggattctatgctcacagtgcacatgctggatgtggtacagaccccaggcagggctcagtggggtggttttgggtgtgcacaggtatcttttctggaggagctggtggtgatttggctcccagaagttcctgagctctgcagactcaccaagcactcaatatttgagtgaacattgggcgagagagcagaaggtaagtgtcagggcatcggggttggtgcctctgggaagaggaggaacattctgggaacaaagctctcccccggcttacagggagcttcccatcgctcctgccttgaggatcagggaaactagggcctctgctcttccaggggctgcttgcaggcagtttgctctgggagggggtgacccaggagttgcctctcattttgcatttgagatttaaaaggagaagggacagtatatcttgccaggtcacaaaaattacaggcatcatattgactgaagggcactcctgtcatcactgcaatataccagaatggtcttttaaaaaaataagtgatttaggtttaccagcaactgtaatgcttgttttattcttctagttcaccgttaatgtcacttttgtagttttagcactggcaatgttgattttatgttgactctgatgattttaagctttcatttgttcacatagagatcatcttctttctgaatattaatgcattttttctctatttctactggttattcctgtacatagagtagagaatcacttttcccaaggaggtggaaagcttctgactaccaaaaaaaaaaaaaagtgtcaaaatgctttaaagtcagtaacttaaagatcaaatccaagagtgggcaacagattctgcccagggtctgaaaggtggagaggtgactggtgaggatgtttaaaagacctctcctctctactccctaaatgggggccatccagtgttcttgaggttcagagaaggcccagggctggggcagcagggcactgtcagctcccagctcccaggggccaggagtaagaccccaacactgtccagacactgattgcattcattttgggggagagtagattcttatttaaagaataatacaaaagtctacaaatatgaacataaacagaaattcctttgctacaattttccccttaataagacattccttcctaatgacatatgtgactgcattcatggctgagatgttttctaggatggtgagagcatcagagtggactatctggtgccttggggtcatgcattttcttcttccaatgtctacaggatcccccatgtcccactttgtagtgtaactcagtgtgtgtcattctggtttttgttgtatagatccttggaaagcccatgtcattcctgctgtgaggtacaggcagccaaatggcatcatctctaaacatgccttctcctggtacatcaaattatggaataaatgaaagccattttgacagatattgaagatataagtttctactcttcccacacatgcttctcccaagtgaaggattttactggtgaattgttattagagattagtgtggatcagtgactctgccaggggaaattttgccctctaggggacatttggcaaagtctggaaacattgttggttgtcagagctgggggagggagtcctgctggcattgagtgggtggatggtgctgaacaccctgcagttcacagagccccaccagtttgaccacccaaatgtcaatgctgaggagtggagagccctgctgtgccctcccgcagcttccctgaagcttcccctcacctgctcctcccatgtctccccaccacttccccacttcacccgcctccttacacctcagtcccctccacctgaactcaccccttagtccaaggccagccctgatctccgctctcctggtctccttgctccttagcaggaggcgcccactagatggcgcccttgcccttactggagctcaccgtctccctttccaccctgagacaaatgtggctgcttttactgccacaaccccagccctccacactctagatttgctcagggagcagctcctggacagacctcagggaccccagggaggagcctcactctggagattttgatggcatggtctttgaacttcactgttacccccagtcaggatccaggatgttgggagtgcatgattctgcccggtcccacttcagcaggaccccactgctgagttgtctgtggggacccgggcctctcatctccttcttgcattgcaggagagggatcttagcactgctttcacataaagtcagataatggaggagtgcaggtgagtttgggaaggtggacatgaagagaggttgtgtccctagaggtggcagcagtgagaggatgggcaggtgggaggaacacagcccatccagggttgccagccatattaggagcgacagcctttcctctaagcctccagcctttttcctgaaacattccagaactttccacttcagcacttcccactgaggctcctcaggtctgtccctgagctcccagctgagcctacctacccatctgaaatcctgagtcctgtgtcaccctcgttccccattattctgtgcagttctgtgggacgcccagctctcctgacacccccagtcttcagaatggccatcagcgctgtcgctgtggcaccagggtgactgccgcctggaggctgagtcctggcttcctgacagctgtggggcccgctctaggctcccttgtcctgatcattcatcacctccaggatgcacagcagctgggccagggggaggagcagggacaggtgtcagccaccctgtgtgtctgcaagtcaggctgggggtgtgggaggacgccaggaatgactgaactttctgatttagagggtgagagcttgcactgatggaatttgggatttaataggaaaagcatagcgttttcctattttgtaggcagggtggctggagtttggaatcatagattcccctgggatgtcactgtggacctcagtcccacccgttaggggcacagatttcagaatccacaccctggggcaaagcaggcatgggaggctccatcagcctggccagggctctctatttgtgcagctgctgcaaggagatgtgcactctgatgggaacagtgctccctcctccttggggggcagtatctagctccctgcagcccctctccctgcaggccctgccctctctgaacctcaccttccccaacccgccccccgcaatcccatctcagctgtaatcccaacactttctcatccattatgggtggactgcttgagcccaggggttcaagactatgctggctggacaatatagcgagttgttgtctctacaaaaagacaaaaattagctgtgcatggtggcatacacctgtagtcccagtcactcaggaggctgaggtgggaggattgcttgagctggggaggctgagttggcagtgagttgagattgtgccactgtatacttcagtgtaggtaacagagcgagaccctgtctcaaaaaataaaagtaaaaaaaaaaaaagaaatatggaatacattattgttaactctaatcaaccatgctatgcaatagtccaccagtaataccagtaatagccaataatgaattatctgaaaaagaatacaatttattcttagctatctactgctaaaatttttaagctatcttttatgatagctgaaacaaaagaagtaaatttaaccaaggaagtaaaagacctttataatgaaaactgtaaaacattgatgaaataaattgaaaaagacacacgcacaaatagaagatattccatgttcatgaattggaagaactgatattgctaaaatgtccttaccacccaaagtggtctacagattcaatgcaatttctgtcaaaacaccaatgatattcttcgaagaagtagaagatcctaaaattagaaaccacaaaaattcctaaaacctgcacaaaacaccctgagttgccaaagcaatcttaaacaaatagaacaaagctagtggcattacacttcctgacaatcaaagcatactgcaaagctatagtaaccaaatcagcatggtcctggcataaaaacaagcacatagatcaatgaaacagaataaaaatcccagaaataaacccatgcatctctagctaactgattttcagccaaggagccacatgcacacaatggggaaaggacagcctcttcaataagtggtgctggggaattggatattcatatgcagaagaatgaacctagaccctatccctcaccatgcacaaaaaattaactcaaaatgtattaaataaagacttaaatgtaagaactgaaactatgaaactactagaagaaaatatagggggaaaatccatgacattggtctaggcaaagagtttttggataaaatctcaacagcataagcaacaaaaccaaatataaacaaacgggatttcatcaaactaaaaagcttttatacagcaaagaaaaaaaaggccagcagagcaaagagacaacctacaaatgggaggagaatatatttgtaaatatatacatatatatttgtaaatatatacatctgataagaagataatatccaaaatatataagaaaattatgtttctgtatagttttatctgactgggatacagaggccacatccacagtcccatcctcaaaggccacttgttcccaaaatgtcaagcacatccctcaatgatccatcatcaacacctatgtctgtaggatgaagggtgaatcatgaagcactaaaaaggaagaaggaagccaatcccaaaacaaaatgatgcagggtctggaaagtccaaagcattttttttttttttttactgcatcttcctcctttcttctccacattcccaatcctcactattgattaacaaaacaaaaaaaactgggacccaccatcttccctactgtcaggagatctagcgagattgtttgagtcttagaccaaactttgccataagccaaatttctggctgactttacaatgatatgagctagcacagtctctttttctgccagtcaacttgtgctcggttttatttgcaaccaaatagaggtggtaaccaaatataggtgaccctaaaattagtcatcaggatgaaatcctaaaatgtgcaacaaactgggttgaattcaggattagtagcaacatctctgttgtgggcttgaaaagggggcacccttttatgcagtagcaaaattgctaaattgttgtttgctgagtctttggactctcatcccggattttctatgaccattcaaacagggctgcaatgaacatctatggttgtttagcttggcacacttctacatttctatatagtaatatctagaagtgcatttgctcaatcacaagatatgcacattttataattgactgctatcgaactaccttaaatagccttaatttgttctcaacattgtttaacagggtctgtttaatgtcctacgtccagcaaggacagtatcacttttcttaatatttttcaaattattggaccttaacaaatacttaatgtgcaattaattgattcctttgtattcccatgccttcttttatatgtttccttatagtacacaaaaccacattattgtttctttacttgtgtcattccaccctggaccattcctatctaaactataacattatgagagagagagagagagaaaacaatatgaaaatataaattgattaatcaaaaaaatttaaataggacaaatcaggaagacacaagagagattttaaaattattcagagaataccacaatagctgtaccaatatattttaaaacttagatgaaacggacaactatctcgataaatgtaaattaccaaaactgactcatgaaaaaatggatattatgaatagagcaataatcagtaaagcaattaaaaagacagttgataatttttatttactgacaacaataacaaaatttcaggtcctgatatttttatggtgaattttaacaaattttcaagctcctcctcaaccaattctcagaaggtttaaaactttaacaagaaaacactttctaacacattttcagaagctgttatagcatgataccaaaaccacacaagaaaattatagaccaatctcacttacaaatatacatgcaaaatcaaacaaaatcttagtgaaccaaattcagaattaataatagcaaacaagcaaaatatgttatcatacgtatggcttatatcaggaatgcaagtatgtttcaacatcagaaaatacttctccacattaacagactaaaggagaaaaacgcttgtttaattatctcaataggtttttagagaattttgaaaattttataaagttatgcgtattctgtaaaattgatgaaatccaaccttgatttatttttaaaaattgcctttcctatagaattataggtaaaggaaacacatgcatcctcacagagctacttcaaggctaagttacttcccataagtaacgtatcctgtaatgtgtgcttggcacatattcaatactaaacaaatatttgcaaatcctcaaaccacttctcgctcaaataacccacctttgtcttttgcctttatgttagggttgattttctcaattgtatcttggagatcctttggtgggtctttcagcaattaccctgaatttgcttttctgtttacaattttaattcctgggaactctttcttgttctctgactgcacccttttcatgagagttcagccatcaatcctccagaaccccaccccccccgcccccccaaaaagcaataaagatgtctaaaagcttccttctgggctttcgaatgatgtttaccccaggcatttgttctattcgttcatcacccattttccctacaacttgcctacacttgatatcagatttttatttattagtcacctatcttcttcattggcccattttcctattttgccactggttgttctcaaatgtgttatgattcctggttgtacagtcaagtggttgataatcttggatatacgataaagatttgctctgtagctgtgtgtaagcctatataaaagcttttgtatttttcttcttaaaaaagacaaaagatggttgggaagatccctccagttcaccagttcgaggctgcagtgagctatgatagcgccgctgctctagcctgtctgtctgtgaaaaacaaggggggcggggggcgggggggaagactggagatgtaaatctcccgcagggccctacccgtatccgcaacaggtctctaacaggaacagcctcaggcctgtgttggaacaaggtaggttacagaaatctggaagccagatctgtaacttcagggtaaggactggctctcagggctgatcccccgggctgggtgtcccagaggcacccgcccccgccccttccccaaggcaggccaggacaccttcactcctctccttaggctccccacccccttctcctccccactgtgcctcctggagtagcggtggcggtgccacaggggagcggggcggggcgggctctgagggcaagggggatgggccccgccggggtcactggcggccaccctggaaactcgacgcaggccggcccttctagtgaatcgtcccagccacagctggcctcccagccgcgcttggggcgcctcggggcgcgaatggtgcaggttggggagactcaccacgcaccgtcgggggtcggtccggttattcctcaccgctcggctccagtgggcgcgcgggcctctcctcctcagttcctgcgctgcagtccctccctcacccttcgcagcttgggaatccaactgtgtcattccgacggagcgccgtgaggacctccgagggtgttagcgccaagtgatctctgtccagcgctctgaatatccaagtaaaggagttcaatgaagggcgggtcaacggaggagaaaccgtgactctctcaagggagcccaaggcctccttgtctaattagtgacgcgccaatggatggaggctcttcccaccatctcttcccagcatccagtgacaccaccgccaagggacgggctcggcggaacctgcaggaaagaagcatcggctgagcctgactgcagcgctgtgaagagacaggggaggggatcagtagttggtcccgcgcccaccccctgtttccgcgaggggcggagttgactggccatgcaggcagagggcgaaatgtgaaattccactactcctaccgtttttccctgacccgatggggcggagtgtcgtcaggctaagttccctggcggtaaggtggggagattgaggcgcacacctgccgaacggtaacgcaggattagctaaggcgagctcaggacagaagcctcccgaggagcaggagggcaaaataataaataaataaataaataataaataactcactccttggtctttatttgcggcaggaattcagaaggtgaaagcggggccttaggatctttctgaccttttgggttttaagcaggaggtgtcagaaatgttaccacagggctagctggcttgtggccagcaagcgttcacaatgccctcgatttttcatccctctctgtgggttctttttttcattgtaaggcagaatttctacgattgctcacccactcagagaacctgagctggtttagaccaggtgagacaggctaggtttaccctggtgatgatgtgttgttgccatggcgatcctgcccagtaccagaggccctgcagattcagatgcttggtgcctgtgcttggctgaggggccaatgggtgaagctgccatctgcgggatgatgactgaagcctctaagtcagaatccgcccaggctgagccttagggcagctccatggagcctcggctggcctgggatagagagtccaccactgtgccagcccccagccactgcctaggtcctgtgctgagagccccttgtccagggaaatggcgtccagtggaaaagggaccacccccttgcccttcactcaaggcaggttggtgacaaccctgaagctaatccgttcctagaggagctgcttctgggtccgagttttctctgcagcagagcagctccctggatgggatctgttcaaagtccgcctttcacgcggaattttccgtccttgcaattttccacctccaccactaggggatcctctctgaccgcctcatgccggctctggcctctgagcaggggtttctcttctgcatgtgcgaccttgcgcatgcctagtggccttttgggacctagagctgctccacaccccgatggggttacagagtgcctcgcctccactccaccccaccagggttccttccctggctgggatgggatttcagaagcgccgaggaacagcccagacaggtgtgggagagtagccaaggcccctgtcccggggtggccaggacagcggtggcctcgcataggacctggctgggctgctgcaatcagtgtcctgccccttggagagcaacagtgaaaacaacaagactatcttcacccaccttaagaaagaacagaaccagtatccccaactctgctgtgtatcccaacccaattccattccccaccccactctcagtagccaatatgcaaaatattagaatactcttactgttattattttcaaccacactctgcatcctgaaaaaccatatatttcgttatgtgcttttaaacttcttgaaaatgaaatactgaggctgggcgcagtggctgacacctgtaatcccagcacttcgggaggcggaggcaggcggatcacgaggtcaggagatcgagaccatcctggctaacacagtgaaaccccatctctactaaaaatacaaaaaattagccgggcgtggtggcgggcgcctgtagtcccagctacttgggaggctgaggcaggagaacggcgtgaacccgggaggtggagcttgcactgagccgagatcgcgccactgcactccagcctgggcgacagcgccagactctgtctccaaaaaaaaaaagaaaaaagaaatactgaattttcaaatacttgctttttttttcggtcaaaattatgttctcaaatttcactcctgtagatgtgcgtggctggctgtagtttttgcatttttattattaggtattctcctgttgcattaatatgccacattttatttctctcatgtttttggtgaccacttggggtgttttttggttttgtatttttgctgtatacatgctgccatggtggacatacctctttatacatatttcctgttgtatgcagacacaattttaggatgtgacatcttcagcttttctattgtgtcgtgtgtcttttccttcgtgctttgtgttatttacatattctggacacagattctttgtcaactgtatgtgctgcacatctctttcccagtttgtgtcttcttcttcttttttttttcttaaaaaaaactttctttatagtgttttttttttctttctttctttgttttgttttgtttttttgagatggagtcttgctctgtcacctaggctgaagtgcactggccgatctcggctcactgcaacctccgtctcctgggttcaagtgattctcctgcctcagcttcccaagtagctgggattacaggtgcctgtcaccacacccagctaatttttgtatttttagtacagatggggtttcaccatgtttgtcaggctggtctcgaactcctgacctcaggtgatccaccctctttggcctcccaaagtgttgggattacaggcgtgagccacagcacctggcctgtgttctttcttaagtagatgttacttttaatataatagaatgtatcatattttgcttttatattagtactttttctatctaattcaaacacatccccaagggtctttgtgtgtagactgaccaatttctcaagaatcatgaatgaatactgcttctctttccccaatttatctgtaatgctacctttattataaagtttctatgcatgtgtagaaatagttcctgatttttcactctgtgccaccagcataccaatagcacgctgtcttaaatattaaatagcagagctttatgagacaacttgatgtgcagtaggcaattgcccccttgttactcttcttcagggttctttgttgtaccacatgaattttagaattggcttgtccagctaaaagacaactgcaaggattttatttggaagttcataattctatacataatttggggaaagtattttcataataccaagtcttcctattaatgaacacagactctctctctctctcccccacccccacctgtttagttatttatatctttatggtctgttagttattgtttattgtctttcaaccaggtttcatgtttttctacatagaggccttgcatgtgaaagtctttcttcctagcttgctattacaaattttttttaattgcactttttgggtacagtggcttgtactgtaatccccgatacctgggaggctgaggcagatggattgcttgagtccagaagttcaagaccagcctgggcaacataatgaggtccctgtctcaaaaagtttgttttaaaaattgcatttgctgttattcaacaaatgtcattgtgtctcatatatggatttttatatctgataaccttgttcaacaatcttttgattctaacaatatatcagattcttttgagttttccatatagacaataatgtcatctgtaaattataattgtttcttctttgttatttcttggaccttttattttatatttttgtcttgctgcaaggcaatatccctctatatattgtggggtcttttttctcataaagtggggatggtgaacacccttgtcttgctctctgattgtataaagcatgctttctgtagcattttgtagacgctcttttttagattgaggtaattcacttttatttctggtttactgagtttttagcataaattcaggctgaatttgagctaaagctttttctggagacatcatttgaaaaattcatatgatttactttctttaagtcaccaaagttatgatttacattgaactgagtttctactgtttaactgtattcttgggagaaaacccacttgtcactgaacaatatctgttttatttactgctgtcttgtgtctaaattttcttttaggattttttgtatatgctcagattagcctgttattctcctttctgtatttttttctggtttgggggtcaaagttataatagcctcacaataagagctaagaaaccagccctaatggaggccggggcaggaggtttggagttcaagaccagtctgggcaaaatagtgagacccccatctctatgaaaaatagaaattagccaggcatggcagtgagtacctgtagtcctaggtacttgggagggtgaggcaggaggattgcttgagcctaggaatttgaggctgcagcgaactatgattgtgccactgtactccagcctggatgacagagcgagaccctgtctcaaaagaaaaaaaaagaagaaataaaaaggaaaagataaaagagctaagcatctgtttccttttttccattttctgggagagtatgtgtaagactgtaattaactgtttcttgaataatgggagaactctgtaaaataatctggctttggtgttacctgtattggaaggatgaaaaataccaattcagtttcattattggttgatagggctactcatgctttttgttttgttttgttttgttttgtttttgagaggaagtctctctgtattgccctgttgtccaggctgagatgcaacgttgttcacaggcctgatcctggctcactacagcttctaacttccgatctcaatagatcctcccgcctcagccttcccagtagctaggactacaagcatgcagcatcacatccagcctcttttcctgcctgacccagttctggtttcctttagttttctaggtgttcatccattttatctaatgtttaatgcatttggcataagggtgctcagtgtcctttcattgtctgttgtctgtaactgttgccattttcattcctatttatgagtactggcgtcttctctcactttttcttaataatcctgctggaactttgctttttaaagaacatcttttgacttgttgattcttttttcatacatattaactattttcttattttttgcctttatatttatttcttttcctgtttgaaacattgctcttttcttactataaaaatgggtaagtagctcatgaattaccacctcttttaaaaatcttttctactgtaagcattttagcagtttacatttgcccacaagtaccacttcagctacaccctatgtgcttttacataaagtcttcatttttggtaagacatattctcaaattttaattatcacttgtttttaaatccatgatgttttatttgaaatgttgtttctaaagatacattttctggttatacttttattcttctaatttagcacagtggccacaaaacatggtctgtgcagtgcatacaatcgatgagtaatttctgagctgtagtatttggcataatatatggcaaaatttcctaagttttccatgtgtgctttaaaaaacttccagtaaaatacataaatctgttagatcaagcttctcacattgttcaaatagtctatatgtttactgattcatttgactgcttgatttatcaattacaggtaggaatgtattcaaatctcctattaaagtgtgacactcaagtggctttttaaagacagagatgccaaaccaatgaatacatgattttccccaaagcctgcacaaattctctaatgaaattttaccatgaaagtttgtttaattaaggcttactaaagcagtatgttgtcttttactttttaaacagagaatatatattttaatacatcgtttaagtttatgattaattatctattactgaggataagaatctttgcctgtgctcattcagcatttgcacttcatttatgatctgccttctcatagcttctgttaatttttatactagagacatttatttgtttgtataaatgttgaaggtttttttttgttgttgttgtttttgagtcagagcctcgctctgtcacccaggctggagtgcagtggcatgatctcggctcactgcagcctccatctcctgggttaaagtgattctcctgcctcagcctccagagtagctgggactacaggcatgtgccaccaagcaaggctaatattttgtatttttagtagagatggggtttcgtcctgttagccagggtggtctcgatctcctgacctcatgatctacctgcctcggcctcccaaagtgctaggattacaggtgtgagccaccgtgcccagctgggttttttatattataaggagatgtaatagatagatagatgtttcaaagatagtcaaatgtttttaaaatttaaaacacttttttacaggttgactttcaccatttaatttcatctatgtgttttgccttagagaaattttaaatgctatgtagatctcatgacttataattatgaagcattttgttttctgttttccacgaaacttagcttaactttgagcatataatagttgtaaaggtaggagagtaacactgaaaaaaggaattgcataaaaatggcacattttctgtagagttgtttatcgcctgaaaataggccccatttcatggaagtaagatgatcaggctcaggtccccagacgaaactcttggcatggtttttggagatagtccagggctcagtactggctctatcatttgctacttctcccaaagtaaccaatatctcatccaccctgagcccatttccatatctctaacatgaggataatagcatctaccttacacaccaagtagagggatcaaatgtaggaactaaatcaaagtaccagcactgaataacctacatcctcccacttcccaaaaggaagagagatgtatcccctgttgacaaacgagaccattttgcaggagagaaaggaaatgccagttcacttgcaatgtaaacatgctctctctttttagggatgtccagggacctgagagagaacccatgcttaccaaagagtttctagttccagacacacaggactcgaagggtgacaagtatggttttcagggtccctgaatccacccagtcctcacagaaactcctaaaagctgtcgattgacagcgttgagttcacagctctggtcctcacatgctgatactgcttgtgatatcgaacccgacaggaccccacatcacaattgatttaccaactacaatataatacctcctgaatctccaaattggctcacccaggaacaaaggcttggggtaaaactggattaggagatataagctctgaattttctgagggtgagacacacaaggattctaagtgacacgccacagagtaacgggtctgtgactggaggacccacagatttgtcttactggagacaccacatgcacacaaactccatccttagctgtggaaacaagggtcttttgctatcttagccgaattctgggagtaatttttggaggggaggagatctttgggattgcctctttcaggccctttacaaaaatacctacttcttaaatggtaaagcttacactaaactgaaaaaattacatccttggctttttatgaagtaggtgttggattgaatcactactggaagaagtatggcatcgcaaattctaagcagtggtcaaaggatggatctgttaaattagaaaaatctctaaatttataaaaagattttagattcctttattctaaacaattgacctatttgtactcatgggacaatcaaatttcaaaggagatatgtaacgatttcatggcttgcattaaaaatccttctgataaaattaaagataaaaaatctgaccccctgccaaaaaaatcttttgaagttcatactgcctgctttcaatattctgtgggattcacaatgaaaggtgccttatattgtggcctagcttcaagtttatgccttcgccaccatggcctgggttcaattcccagtcagggccccagcgcctttggtttaatgtttgcgtggcatttgacttttttacctatttagtattggtgagattacctttggtaaaaaaaagtttaaagagtggaaatcgcaattctttgtgttggctaaaatctgattataagagatctggaaggttttatttttctttttcaaagagctctatggtcagaagtcggcttcatgaaaagctaatatttaattatatgtacatacagtctttctggattttctcttttgcctcctgttttgaaaaatatttggatttgagtgaaactccgttttagaaattaattgcttggtacaatatacccatgtaactaccctgcacatgtaccccctgaatctataataagagttgaaattttgacaaaataaaattagattttgaattaaaacaaataggtgcttggttcctctgctcacttctttttaaaaggaattcctctcccatgtacttcttcttttcccttctttaccttccttttggcatctttggtatcacatgaagggatctagagggaattttaagtgactctgaaattccttgagaaatacacaaaaagatcccactcaccccttttgggggtctcctgttctccttgtggagtccagagtcagggacaggctcctccaggtctgcagctctgctctcttttatttcatcttggctgattgctttggttttgtgagtaccaggcattactttgtactgtgagagacacgtcctttgtgagtgcaacggctgctgggtcactggtgagggctgcagtttggagatggctgagagccgttgcaataaatggttgtgattgcagggggctccttgtttctttgcaagtttagatgagaaaggtgcagtttggacacagtttaaaggctgtgaaaacaccaccaatgaatatgatttcctttggggatggtctgattaaaagtgggctgattgttgctgtgctactagccttgaagacatgtttctacagcattgtgcagtgtggaaaaattgtgtggcttggtcttgtggcatgtcccttcttttagagacctcagattcaatgtgaaattcgggatttttgattttcaaagatctagatgccctgccttccagatgtgcctactcttcacatattttaaaattagatcctataaactgcaaatactttgttggcttctgtgagatcagaggtccagttagaaaaggaagacagtttgttaaaattaaaaactatttatctaatctaactagattggcctccaaatatgactttctgacattcagctggttactctgaaaagatttctaaatctcttgaggctcatctatatgtttccttgcaaagaaaaaaaaaaaaaaaaaaaagcaagcccaagcactagtaagaaaaagatttgcaatgtttcatgaaaggagtagatgagtgaagcatttatttgtagatactgggttggatacctgtgcaaagaagaagaggtcaataataaaaattgccaggggatttcttggaacttaacaagctgaattaaatatagaaatgtcaggaaatcaaggcaggaaatactcacttgtggttaggcagacagggcagggttctgagcttgagatggagcaaacagttgtggtgggtgaagttcacatgctttagagctcagctgtcctagtaaagaagcctaagagtctctaaagctcttatgagaagatggattttttttgcctagattaaaaggttaaagaattgctttaagttggataaaataaagctaaatgtttaagcaagttgtgaaaggtttatgaaaaaattaattaaaatatttttgtgtgtaaacatattgactaaagttgaaggggtataattcagcatttctgtaaattgagcattgaaataaaaacacaatgggtttctcttagagcactaacctgctctttaacaaaaattgtaaagggttatagaaagtctataaaaatgttaccttatggtcaaacattaaaattgggtaaatatgtctatcaggttttattaagaattaggtttaacattaatagtacactaatgtaaaggtgaaatttggcttatttggtacaaaaatcatacaggaagcattgtgaaatataaaatgatttttagctttctttgggctatatttctataaatatgttattgatgagggttccaaagttatgggagactcctataattctgctatatctcagtgtacattatcagtcataattataattgtcatgttaaattattgtgggccacagaggtaacagatttccttgtcaattgtgtctttgactatgactaccctaaaacgttcagtcacccatatacacatgttaccttgttttggccctctttagaaggtaattttataatcagctataaagccctaacaggtgctcttaaatgcaaattttgataactttggagattgtgacatcagaagagaggaaaaatgttcgggacacttggagagctaaaatgttcattgatatcaagcaggacaggaattaactgcatgaagtgaactaataggaggctgaagtgatctttttgactttttgcttaaaacgttgctgatcctttgttttgcttttcagagtcaaggcaaattttcttttgagctattgacagcttttaacgattaatcaaaatatactcctatgaacaccatttggagcattatttgtttctctctacccgatttccccagaatttggaaactatttgtgggtattcttaatttatggcaatatagttatttgcataagtgcaataagaatgtgttttctttggtaacaggacacaatttgaaaaactggttattttaccaaggttttgaccagaatgctgtgctttcctttaaggaatcaaacttgacttgtggagctaataaagcctttggaaaactgaccttatatcctgtgaacacagtccctgtacagggttactgatctgtgggaagaaaagaatgtcacattctgacaggtcaggaatcccaagttatcttgaaacttcaagaggacaggaattcacccaaccatatgtatttgatggtagaaatccatggcaggggctcagctttaaaaagtcttatctcagattccttctataaaacaaagtcccattaaaaccaattttaaaagcctatgtgaaaaataattattcttgctgcacctcgtacaaataaagtggcaaagcataataaagcaaattggtcctgtcgtaatttgtctttagtaaaaacgggaaactggggtcgggtgcagtggctcactcctgtaatcccagcactttgggaggctgaggtgggcagatcatctgaggtcaggagttcaagaccagcctggccaacatggtgaaaccccatctctacaaaaatacaaaaatgagccgggcatgatggcgggtgcctgtaatcccagctactcaaggggctgaggcagggaagcggaggttacagtgagtcaagatcgtgccacttcacgacagcctgggtgacagagcaagactccatctcaacaacaacaacaaaaaagggtaactggagagagggaagttatgtttcaaaaacttttggaaactatagtacacctgtttttaaattctagtctggcattcagtttttattattttctacagtttgggttaaattcgtatttctctggctacaagtctcctaaataatcttttcatttgtttcctttttctttccctttttccccatttttcttaattggaaatcactgaaacctaagctgtgctttcttaaagccctgtgaactgaagactagacaaccgaaacttctgaaggaagtagcagcaacctatttatatgtgttgctgttgcctactattatgttttagcaggtgctgcctctacacccccgaaacagagagtgctactgggaacaaatcgactttttccactccagtgctgcattcggtgccccataacgatgaccccctctcagcaggaagtagccagaaagattacaatgctccatctccctatgattcttgtgataaataaatatacaagcatgatagaaatcatgcgcaaattgacagtggggattgtggcaggccagatttcactaatggaggtccccatcacaactacttcagtactgactgagtggttaagttcagtatcaaaagctgaaagtgccagcgcctttctacaaaggctagaatgtaacaaaagcccaccaagggttttacctaggcctttcctgggccttacagcatgacaaaacaaagaaggaattcttaaccagacctgtttaggattaaacaaatttaattgggggtctgaagaaactcgccaggcctccacaaacaagttcattgggggtctaaaggaaccccccccaaacctctgtgattgagcaggagacaaggtcagggtaattgccccagcacctggactcatttagatttaagtaaatgtactgaggctccagagaaaggtctccaagacttagactagagttacagattaaaagaagttaatcacttatatctttagataaatgcacactgacacgtagacatacatcttagaaaatatataagctctggaaaaccttgtaatttacagttggtctggagatattttctgggccttctctctgtaaccggttccagaaataaaaaactctcttcctccccagtttatctgcatctcgttattgggccgtgagaaatagcagccagaccctgagtttggtctgggaacacactggctgggcttcctgcctggcggtagagcttcactgtcctccttcccagccaaaatgtggcccttgaaggcttcctccccaactgaccggttttgggttctaggtactcagggaacaccgtcttcaaggaggccattttcatactgttcctggtttgatttttctgaaattaggaaatgccccttgaggcatccaggattgtctttatttcccctgaagcttcccctcctgaagaaaaaagttctcaaacaccctcaggactcaaaccccaagttcaccctgtgaaacattcccatttcctaaacccaggcaggctcatggccctcagcctctcagaccccatggaaacctcctcccccacttcacgggttctctccatattgagagcctcccctcctcggcacacaacccagagactcaccccaacatgtgtagcaaatcaccctggaaacaatcatggctgaacgtggtagcccatgcctgtaatcccagcactttgggaggcccaggaggtggatcacctgaggtcgggagttcgagaccagcgaggccaacatggtgaaacctcgactctactaaaaatacaaagttcactgggcattgtggtgtgtacctgtaatctcaactactcaggaggctgaggcaggagaatcacttaaacctgggagacagagattgcagagagccaagatcgcaccattacactccagcctgggcaagaagagtgaaactacatctaaaaaaaaaaaaaaaaaaaggaaaaggaaaagaaaaaaaaaatcatgaggcaacattgcatttaacaatattttatttatcaaaagacacttgtctttctcaggtaagtgaaggtctagagatgaaacgagtcccgatgtaaattgccccatgggcattgctgagatcacaagatcatcactgcagcatgcagcacaatagtaaatttctcaggatggaagttcaacaatccaaaaggtagtattttttttcatgatgctcagtccatcatacgaaataaaaataaattccttttcatgatcatccattcagtagaaaaaatgatagtaaatttgttctcatgaagatttttaccgtaacatataggatttatcgttattattattattctttgttttttgtttttttgaagcggagtctcactctgttacccagtctggagtgcagtcgtgcgatctgggcacactattaacctccacctccagggttcaagcatttctcctgcctcagcttcccgagtagctgggattacaggcatgcgccaccacacccggctaattttcgtatttttactagagatggggtttcaccgcattggtcgagctggatttgagctccggacctcgggtcatccgcccatctcagcctcccaaagtgctgggattacaggcgtgagccaccgcgcccggcctcaatttatcattattcacgcatccacaaactgggttcttatattttgtacgtgattttttccattgaggagagatatctgtgcatattcatgctgctcatatttcatccacaaactcggttcatatttcatccacaaacataattttttccgttgagaagagatacttgtacatatttatgctgttcaaattcacatttcatcattcttttacaagaaatagataatgtattttaaggttttccagtggtattacagatattttactgggtgtatagatagaaattaaaccaaacttctttgttctggccgccagtcatgcatcctgttttcaacatagttcacatacaactggttgtgtaaaaatgaaattattttgtttagtacaatcatcaacagttggttgattagatttttaattatcaagttaatcattgtcattatgcttctcatcgcactcgtcattaattgctgtgggaggaaatttgttatgttccctatgagagggtgtatcacaaattcaaataagaattcaacgacaatggactgtataaaggaaataagcaagtccatggaaaacatatttttttccggaaaggattaaaatatttttaaaaaggaattaaaaaaaaattgggcacggtggcaaatgcctagagtcccagctgctcaggagatggagacagaaggattgcttgagcccaggaataagttggaggctgtagtgaacagtgattccaccactgtactccagccagggcaatagagggaaaccctctttctaaaaagacaaaaagaaacaaaacaaaacaaaaaaacaccacatcaaaaaacccaacaacaaaatgaaaaaccaaataacagcaatacaattggagctattcgatccaaagaagtaaatgaaacataaagcaaataaaagagaaaagctaatacctgtgtcctgcaggactcagtccaagttctgctctgactccctcctggtgagccaccccttaaaaagtcacttggggcggggttactttgacagacagtcttctgtcaaagagggaggcggtaaatagcacttttttttttttaatttaacgcctttccaacaaattagcggctatgttgtctaagagtgcaaatgtcagaggtgggtacaggcagcaagaccctccccacaggggcagcagaaggaggaatgactaagggaacaagactttagtgtgctcaactacacaggacaggaaacagatgctttttacaaaagctggtggacttgaaggcagaatattttcaagttcctgtaactgcgaactatgacctgtagcctgtgagagtgactttctgtggcaaaggagcttttgtgaatgtgaggaagttaattatcttaacagtgggaggttctcccggcttatctagctagaccctcgtgaaatcccaagtgtccttaggaaggggaagcagagagagatttgagtccagaagaggaagaaggtgatgtgaggcccagtaggggaacaaagggcgatggcatgtaaacacttagcccccagaagtgggagagggctggggttcatcacaccagaatccctaacaatcagccttattttaattacccttgaaatggaaggaggccttagagagccagaggcttggaggggcaccctctgctgcatacacagatcccaactgctgtgggctccaaataattgcaccagggaaatcacaaattatcaaaaataaaggatgtaaagcttttaaaaaatattaaaagcccaacaaataaaaaaagttctaaatctataaaattgacctcagtctgtatatttagatgagtcatgtgtatatagcgtttcacttcaaaatatatgataaatctctcattcattggcttaaaaataaacacttcaatcaagtctttatcagaaaaattgaaacgttaactcaattgccttttagttcatgtgactttacaaaacttaaaacaataaagtcagttttaaaaattattagtaaagtaaaagaaaaatatcttcacaatgtagacattttgtccacatgagacatgtgaaatattgccattactaaatatttgcaggtcaaaaactgtttccaaaacattttaaataatcatctggcctgtctgttttagagcattcaattctagctgaggtctggggacatgtgaaaggagccacggcccgactccgtgctgggaagagtcagacattttccacagctctgtcctttgctgtgggctctgcaactcctaccaattaaaattgcttacgtttttgttttatttttactaaagaggggttcctaaaagctaacattatactgagtatatgtaactaaaactactaagaaaacaatttcacaattatacaaatgtgccaagtaaatgaaaaaataaactgtattttaataaaggttataaaaagaaaaacatatagtggtgtgaggactgtctcaggtcttcactgagcaagggatcatgacattctatggcggacagctgaccttggctttctgctcctcttgattatgtctactaagtgacatacttactctttttccacctgtcttgcctctaagggtaacaggttttatgagatccctcctagtgctttgcaggtcagcctccctttgctgcattccaattttactgcctataccctccagctggcttttgatgacaaaagtcctggtcccagccattctcagattctgtcatccccgtgggcactatggagctcagcactatgggaggttccccaaaaatctcgttttctatgaggaatggccaccacctgcatctcagtgatgctagtgacccctttcctactcctgtgctcactggtcctcatgaagatcctggttggtctgtagccccctatttttcctattaaagagaaattacagtaagacccatttgtgtgcaaaatcaattttaggcttattacacttggcctgataatttgcataaaatgcagcaagaattcatcggccatataggctacttttgagttaattttcctgggtttttacctaaaaatatactattttggttagagtcttgtgaaaataaccaatgtgttcaattgttttattttaaaaggctcttactgaacactataaatatgtataagttgaatatacaaactatattgtcataaaatcacaacccaaaatgtggagaacgcagagggaaaggtaaatttgctcgcaaaaacatacttcacccaaataactggaaaaaaaaaaagactttcatgacccttctttaaccagagcagcagctttcaaacaaggtgtttgccttggaaatgccattcacaagccaaacggcccttgagagctgtctgtcaggcactgtagaatctagcagctcctcacagagttagaaatagtttcaggaaagagattccctgcttttagtaactgcactttatattcccagatagcgagattgtatgtaaaccatttttatcttattctggaactcttttgggtactttttttttttttttttaaatgatggagtctggctctgttgctcaggctggggtgtagtggtgcgatttcagggtatgagaaaatgcagctggacctggctctttccaggaagaccctcacagccaaggagtccaaagcctggggttttcatctaattccagtgtgactggggtaggagcagctttggtgctgggtgtgtgtgtgtgtgtgtgtgtgtgtgtgtgtgtctatgcctgtgtctgtttagggtgttaggctcgtggttgtctagatacaaatgtcccagggctcaggagccccagggttatgtcaggggcaccagatgaaggtgtcaacagaagttagggcacaagggacaaaggtgagagcaaggttagattcatttaggtgcaagaaatcatagagggaggagggagaggaagccctcctgctaccaccgaggaagaagcgcagcttaaggcagaaagcctgtccggagaggaagtgagtttgagggcagggctctctgggtaaagtacggtctgggacaccagcctgggggaagggtacagaatgcagagtggcctggcgtggggactaagaacagaggagagcagctttcactgggagggtcagtgttttcagtgtccagcactgagcaaggtgagatttgggcagcttgctgtgaaataaggtcaggctctggcattgtccccattgcgtgtgtgtgtgaggggcactttgggagagtgaactctccacctccatcctctcatacgtccttcaaccgagcttgccagttaccctgattccaaggagatctatttattgttgacaatactggatcctagcagaggctgggtaggagcctgggcacaagcaagtggaggagggggcctgggcctgaaagacctgggaggtttgagagaggacacagcccacagaatggagcagatggggtagagtcggcaagcattcagggctcctagtaagttggacaatggagaccctgaaagatccagtaaaacggggagaacaaacaggtccccaactcacatccttgcagtgcctggagcttcagactccagacaggtggggaaggaaaattgagggatgtgaacatgttggagaatgtcgtgccctgaagaatgaagaaaaggggggtgaggaatgagagcaggaacggcttccagtgcctggtgcccaggagaactcagaaaatgggtgtggtggagaggaatcgaggaaccggaagtggtggaagtgtgcagggcccctccgagatcactgtgactgccaggcgtcctccctggctggagagcttcactgtcctccttcccagccaaaatgtgtcccttgaaagcttcctccccaatggactggttctgggtcctatatatttgaaggggtggcctgcctctccacacctgtgggtatttctagttgggtgggaggagagacagagaaaagaaataagacacagagacaaagtataaagaaacaacagtgggtccaggggaccagcactcagcacaccaagggcctgcaccggcaccggcctctgagtttcctcagtttttattgattattattttcattatttcagcaaaaaggaatgtagtaggagagcagggtgataataaggagaaggtcaatgaaaaacatgtgagcaaaagaatctatatcataattaagttcaagggaaagtactatgcctggacgtgcactcaggccagatttatgtttctctccacccaaacatctcagtggagtaaagaataacaaggcagtattactgcaaacatgtctcacctcccgccacagggcagcttttctcctatctcagagttgaacaaatgtacaattgggttttacaccgagacattcagttctgaggggcaagcaggagacagtggccttcctccatctcgactgcaagaggctttcctcttttactaatccacctcagcacagaccctttatgggtgttgggctgggggacagtcaggtccttctcatcccatgaggccatatttcagactatcacatggggagaaaccttggacaataccccgctttcaagggcagaggtccctgcggctttccacagtgtattgtgcccctggtttattgagactagagaatggcaatgacctttaccaagtatactgcttgtaaatattttgttaacaaggcacatcctgcacagccctaggtcccttaaaccttgatttcatacaacacatgtttttgtgagctccaagttgggtcaaagtggctgggtcaaagtggctggggcaaagctacaaattaacaacatctcagcaaagccattgttcaaagtacaggtctttttcaaaatggagtctcttatgtctttcctttctacatggacacagtgacagtctgatctctctttcctttccctacatatattcatggaccacagtcttcaaggagtccatttcctcactgtttttggtttgatttctctgaaattaggaaatgccccattgaggcacccaggattgtctttacttcccccagagcttccactcctgaggcaggagcttctcaaacaccccccaagactcaacacctaatttcaccctctgaaaccttcccatttcttaaatccaggcagggtcatggtccttagcccctcagatgctgtggagaccttctttccctttcatacattctctcaagattaaaagccacccctcctcagcacacaccccagagactcaccccaacatgcattgcaaatcaccctggaaacagtcataagaccacactcatttaataatattttatttatcaaaagacactctttctcaggtaagtgaagttctggagaggaaaagaggagtcctgatgtaaattgccctgcaggccttgctgagatcacaaggagattgttactgcagcttgtagcacaatagtaaatttcttctctggatggaagttcaacaatccagatcgtagtatattccttttcattatgctcagtccagcaaatgtgatgataacaaattccttttcatgatcatccattcagcagagaaaatgtttgtaaatgtgttttcatgaagatgtttaccataacatacaggatttaccattatcaatgcatccacaaactctgctgttgttttttatacataattttttccatcgagaagtgatagttgtacatattcatgctgttcatatttcaaccacaaactctgctggtttttttatacgtaattttttccattgagaagtgatacttgtacatatttgtgctgttcatatttcatgtttcatcatccttttacaataaataggttatattgtattttaagtttttctaactgtagtgcagaaattgtactgggtgtatacatagatatcaaaccaaatttacttgttctggctgataatgcatcatttatttcatagattatgtatttctttgacacatttcacgtacaactaattgcataaaaatgaattttcttttagtatagacatcagcatgtgcttaattcggaatttaattgttgagttaaacatcgtcattgccttttccgttgttattaattgctctggtgggaattttgttatctcatacataagacagtgtgccacaatatctcttaaaatttcaatggcaataaactttatatttaaaaacagggaatctatggaaaacacatttttttctaaaggattaaaatatttttttaaaataattttctaaaaagttaggcacggtagcaaacgtctagagtcccagctactcaggaggctgagacaggaggattgcttaagcctacgagttgggggctgcagtgaactgtgattgcaccactacattccagccagggcaatagaagttaaccctttttctaaaaaaaaaaaaaaaagaaagaaagaaagaaaaaaagcaacaacaccaaaacctcaccaacaaaatggtaaagaaaaaaaaaacagcaatacaatgtaagctatttgatccaaagaagtcaatgaaatttaaaacaaatgaaagggaaaaagtaatacttgagtcctgcaggactcagtccaagttctgctgtgcctccctcacggtgagccacccctttagaagtcacttgggtcataagttaacccgataggaagtgtcctggccaatgaactagggaggtggtaaatggcaccattttaaatttaaattcacggccttttcaacggatcagtagccatgttgggtaagagtgcaaatgtcagaggtgaaaagaggcagcaggaccctcccctagtgcttgggcaacagaaggtggaatcactaaggggacaagactttagcatgctcaagtacacaggacagaaaacatgctttttacaaaagctggtaaatatgaagagggaacattttcaagttcctgtaaccaagaactaccgcctgtaaccggtgaaagtgactttctatggcaaaagcgtttttgaaaaggtgaggaagttaaatatcttaatgttgggaggttcttctggtttatctggctagaccctaatggaatcccaagtgtccttatggagcggggagcagagagagagatttgagtccagacgaggaagaaggtgatgtgagtctgggtgcgggacagggggagaatgatgctatgtggggatctgggctggggaatgacttagctgcatgagcggagtgacttagactcctgaactagaagaaatctagggctcatcacctcagcagccctaaccatcaaccttatttttattacaggtcttccatcgacggactccctaaaaagccagcggcgtggaggggcgccctctattggacaaatagatcttgactactttcggccctcaaatagcctgactaggcaaataacaaataataataatttttttttaaatcatggaaaatattttaaaaaacaattaaaaagttataaatctataaaatctgcttctgtctgtgtgtctgtatatttagatgtctcatgtgtacataatgtttcactaccaaaatatatgatgaaaccctcattaatcggcttagaaaactaaacacctaaatattttctcagaaaatacaaaaactttaactcaaatcccttttaattcacctgactttaaaaatctttaaaaaataaagcatgctttaaaattattagtaaagtaaaattagaacatcttcagaatttagacatttggtttaaattatacaggtcaaatactgcccttagtaaatattttcaggtcataaacaactcctgtaatcttttaaataattgaattacatgtctgttttagagctttaagttctagctaaagcctggggacaaatgaagggcaccatgccccctctctgtgctggaaagagacattttctacagctctgacccttgcagtaggctttgcaactgctacctatcaaaattgcctacatcctaagtttattattaaaaggagttgcttggagttaacattataatgaatatatgtaactaaaactatttctcatacaaagtatatgaaaaagtagaatgtatttttaataaaaagttataaaaagacatgaacatgtagtttttataaaaaacagtaattttgtctagttttgcagttctaaaaagttatgttaaattcaaaaataaaaaataacaagacaagactcaaggtttaaataagttgtaaaagatttgtaaaaattagttctataaaaattttacaaaaaaaagcattggttaaaatttaaggaattattttgtttttacagaaattaaacattcattaaaaacactctgatacaaggccttaatttgggttcatgtatcagaatagcagggttttcttagaatattaatctattctttaaaagaactatgaatgttatgcaaactttataaaaatcttaccttagagtcaaactgattaaaattccatagattttacgtaaaattttattaaaaattaacttcaacaaaaataaaatttgattttctcctttaaacaaaagttttgcgtaatattaaataataaagcatttttgtttaccttttaaactataaacacacacacacatacacatacaccaacactaaagtcagctgacctcatactgtctttattggatattcttgtttaaaaaactatcttctttggaaaataaagttttttattttaaaccatattttaaattatcattttgactaaatccataacatacagtgatctgtaataattctattttataatatcaagtgttttgaagaactccaggaacagccatgagagaacactgtggtttagtaacactttatttcctcagtttgaaaatagttgtctttcttggggaggccggtttcagcagatgaaaacaagagtcatgatgaaaattacccagcagtggttagtgtgaccataggaacattgtcatcaggtcagcagaaaacatatcagcaaatttttctcatactggcagtgtgtaggggtggatgtttacagttcctgaagccccagtggtcgtgtggtcttttagttttgccatttataggcaacttgtggtaactagctcaattagacacattccttatcacaaggacagagggctttctgtatcctagggttcttgccttggcattccagaagaatcaggtcacacgtggacgtggagaatgagtgcaaggttttattgagtggaagtagctctcagcagatgggggagccagaaaggagattggtttctccctggattggggccgttcagcagccctggctctcctctgactgccccaggcaaaatccacatcgttctataagtcggtgccctgctggtgtgctggtgcctgttgtcatgttcctcttcatgtccagccgcctgtgtgttcctccgctgatgtgctcctctcgacgtcaagcctcctgtgtgtctgactgctagggtcttggggtttttataagcacaggatgggtcttagcaggccaggatgatcttgggaaagacaacattcggtcaggaaaacaaaaatgcctgttgtcatctaggtccgtggggacaagcccaggtgtggagcttttagccagggaccacagcctcctgtatccaacacttcccttcaccttttctatatcattcaaagggatcatgcccttcccatcccagcacttcactttcatgtcatttgccccctctgaagaggtacatctaactgccattagaatatggatgatgaccagtcttagctgcttcctgctgaaagggggcattgttttgggggaaaacggcagtcagattcctcccaggggtctctataataaaagatcgaggtggctactttcaggaggtcctctaatgtactatctggtcccaagtcccatttctgcaacctcctcctgatgtcaggagctgcctgagtaataattttatcctttaggattatctgtccctcgattgaattaggagatagagaggtgtgatttaccaaggcctctcttagcctctccaggaaggcagtgggattttcatcaaatccctggttaattatggacaacttagtataattgagaggcttggtcttagacctacgtaagccctctattatgcacacctgaaagtgtctcctcttccagtcttccatctcattattgggatcccatttagggtccttcactggtgctacttctcttccagttggataatattcgctcccttccctgatgctataggtgatgcaaagctcatccccaaatctctctgctgctggcagagcagcctgcttctcagtgtctatcaggttctgactcaaaagtaacataacgtctctccaggagagttcaaatgttagggtgaaattctggaaagcttctatatatctatcagggtcatctgaacacttgcccagatctcccttaatttgctttaagtcttgtagggaaaagaggacttggaccttactgggcccaaattcactgggcatctgtaggaggggcaagagtgagactgggcttgtttgggatgaagatttctaggaggggccaggtgagaggctgaagctggatacggaggttggggtggacccagaggagcagggcttgagggagctggcacgtcagctgggggtgcgtctgggactcgtgtctttaattccctgggcttgaccctggcagccttccccgagacagcaaacaggagggctggaacaatcctacatgtcagcaaaggtctggattgctttgcaaggtatagaaagcctgcacatttggggcctcagaccatgtgtcctcacatccagagaaaagttctaattgcaggatggtattgaaatgaatggtcccttcctgaagccaagccagtccttcctgtaaaccataatttggccaaacctatgtgcggagggctatgagatgcttttcctctggattctgagggtcaaaacagtcccaatggttcaggatacactcaaggggagtacaagctgggggtggtgaggagaactggctgcccattctgaaagacagggaatagaggtgttcctcatttcccttccttcttttggcaaaaagctcagggtgtgatggggagggaaagcaagcatcttcacttcactttccacctcttacccctgcgccctggcaaccttggcaggtgccggccacaggtacaaatgcggtatgtacccatgaagcagggagaacctggagattaggaattaactgccctcacctatgtttccttttctccctgctgttgaaaaactttgagttccctgggcctttttatcccatgaggcatggcctccttctgtgggatggggttcagtcagcaggaattggtcctgtccatttacattgtgcctgttgcctggctttgaattcctcagacctgctttctctttctagggcctcagcctgaagcttggaattgagtttgggactgaaaaagcatttcagaggctgtttatatccatttagtgcctcaaataagccctgctgaatttgcaattatcagccagcaggggtcactcctctgttaacttccctattagaaacagagcggtggggattctcacttagaaaagaaaaaaagagaaaaacagttaaagaggcaaaaagtggggaatgctgggggaagaaccccttgcttagtgcaagtgggcccctctaatccttataactttcccatccttcccccagttcagaccaggttgaattccttggccatggaaggaaaggttccattgatgcagtgggtgagaagcactctgtagggtcctggctaccatcggttttctcacacccccctcatcccaggcagtggagggagacacttctgcgacattgctccccctgccccttcatggctattgggtgtggcctttgcctgctgcaggcatgcctaggtgctggagctgggagggaaaagggtaaggagaggtgccctggaagccgctcatgcctggggctgtcaaggtggaggcatacatggcacctctaggaaaaattggtctgatttgcacctttggcggctgagccaaatgctcattttacttagtaacattgcctcagcctgtagcaaaactcttaacattataaaggaagagataagatccatttcaaataatgtgtgagagagaaaagagatgaaaggaaaacagagtcttttacctgcaggaaagggagagaagtggcagagttttggaagaaaggcaggcccaacagtttcccattcactcacactcaccttccgagatcccagacgagccaccagttgaaatgggaaaagtttccttgtccccctcacaggaggtggagtgggggtgtggcttgcttctttagtactccgctgctcaaacctctagggaagcatacagactggcaagttgtggggctacaaccccatggcagcatctaggggtagatgtttacagctgctgaagccccagtggacatgtggtaccatgtgctcttttagttttgccatctataggtggctttgtggtaaccagctcaattagacccattccttaacccaaagacagagggctttctgtatcccgcggttgttacctaggtgtaccagaaaaatcaaatcacacgtggtcttggagaatgagtgcaaggttttattgagtggaagtagctctcagcagatgggggagccaaaagggagaatagttttcccctgaagtcgggttattcagcggcccaggctctcctctggctgccccagccaaactctatgtcaatccattggtcggtggcctgccagagtgctggtgcctgttggtggattcctctcagcgtcgagagtttttccctctcaggaaagggagagaagtggcagccacccatgtgttcttgcactgatgtgctcctctcgacgtccaacctcctgtgtgtctgcctgctagggtcccagagtttttttaggcacaggatagggcatggtgggccagggtgatcttgggaaatgcaacatttggtcaggaaaacaaaaatgcctgtcctcatctaggtccaggggcacaagcccaggtttggagccctagccagggaccccggcctcctctacccatcactttccttcaccttttctgtatcattcaaagggaccatgcccttcccttcccagcacttctcttctgtatcaataggtgatgtttttaaaatttcccaactctagtgcaggcatggtactagacatatacatagaaataaaaccacacttattcttctggctggcaagacatagtatttttgccaaattatgtgttgttttgaagcattttatgtacccctggtcatataaaaataaagctattttgttcagtacaaacagcagcattttctggattagaaagttaatcatcttaaaagatcatcacggatttttccattgcactcatcactaattgctttggcaaaaaatttcttatctcacgcatgacaaaatcagccgcagtatctcctagtaatttaatggtgatgatctttataaaggaaataagcacatcaagggaaaacataattttttttaaaaaaagagtaataaaactttttaaaagtcttttttaaaagactgcttttctaaaatagtaaaataaaactccaccaataaaaccaccaacaaaacagaaaagaaaaaataatgatatgatcggagctatttgatgaaagatggtaaattaaatttaaaatgattagaagagaaaaagcaatacctgtctcccgtaggtctcagtccaggttctgctatgcctttctcctggtgagccacctatttaagagtcgcttaaagcatatgttaatccaacaacagcagattaaaaaccaatgcaatctgaactatttgatctaaaaacataaataaaatttaaaacaaataaaagagaaaaagcagtacctgtgtcctgtaggtctcagtccaagatctgctctgactcccttgtggtgagttagccctttagaagtcacttggggtggggcatatgttaattccactaacattggttctggccaatgagtcaggaaggtggtaaatggcaccttttcttcttgctgatttctttcagttcctttggagtctggacattagtcctttgtcagatgcctagtttgtgactactgtttcctatactgtgggttgtgtgtttaccctgctgatatttcttctgccttgcagaagattttcggtttcattaggtcctattgatcttattctatttttatatttttgcgtttgcttttggggcattagtcatgactacttggcctaagccaatgtctagaaaagctttttggatgctatcttgtagcatttttagactttcaggtcttagatggaagtttttatatgctttgttaaagatcaggtgactgaaagtaccgggctttgtttctcggttctctattctgttccattgctctatgtgcctatttttatacttcctgcaccatttattgaataaagtgtcctttccccaattagtgtttttgcatactttgttgaagattagttgtctgtaagcatttggctttatttctgggttctctattctgttccattgctctatgtgcctatttttatacttcctgcaccatttattgaataaagtatcctttccccaattaatgtttttgtgtactttgttgaagattagttgtctgtaagcatttggctttatttctgggttctctattctgttctattgctctatgtgcatattttataccagtatcatgctattttggtgattgtagccttgtagtataatttaaagcctgccttcagatttgttctttttgcaaagtattgctttggatatgcggtcacgtttttggttttgtataaattttaggattcttttttctagttctgggaaggagaatgatgatattttgatgagaattctactgctctgtagatggctttggagagtatggtcactttcacaatattgattctacctattcataagcttataatgtgttcccatttgtttgtgtcaactgtgatttctttcagcactattttgtagttttccttgtaggaaacttacattaacctacttggttaagtatatttctaagtattttacttattaaaaattctcagggaaatgcaaagtaaaactgaggtgggaaattaaagaaaaataaaattaaaaagaaagggaaataagctttcttgtattaagctaacttgtcccagaggcagcaacaggcacagcccagacccaggaaaagtcttgataatattatttattgtattctggagactcttccagcactccttcaatgtagggagaagaaaaacaaattttcctttgttttatggtatgagtttatagattcttgttctctttaactagtaacttcaagtattctgttttatctaagaagtatggcaaaggtcatgagaagcctgagcaggcctgaactacagctctctaggcaccatagtgaagataaaccaatgcaagcctctttagagcaaaacctagataatagacatctgggttgcatagcaacagttatgtgcaatcctgagttatgaacctgttacaatttgattaactgtctttttcctgcctctgtatccctgctttcacaccactgtaagcttgcttcaagctggcccacccccttttgtgaagtgtgtataaaagtcaagtgctgtctttgttccaggccctgtctttggacgtgagtctgctgggcctgagagcactcaataaaagattctcctgttttaacccaaagcctctctctcatcctcctaaatcccacaacaaaaccacaatgagatgctatcttaatcttgctagaagcccataatttaaaagtcagaaaacaatagatgttggcatagatgtggtcaaaagggagcactttgacactgctagtgggaatttaaactagtccgaccactatggtaaacagtatggggattccttaaagaactaaaagtagaccattcattccagcaatcccattactggctatctacccaaaggaaaagaagttattccataaaaaagacacaagaatatggatgtttatagcagccgattcgcaattgcagtgatatgggaccaacttaagtgcccatcaacgaacgagtggataaagcaaatgtggtacaccatggaataatacttgataataaaaaggaacaaaataatgtcctttgcaacaagttggatggaactggaagccattattctaagtgaagtaactgaggaatggcaaatcaaatattgaatgttttcacttttaaatgagagttaagctatgagaatgcaaaggcataagaatgatataatggacttggggactcagggggaaaggttgggagggggatgaggaataaatgatgacatattgggtatattatacactgctcaggagacagatgcctcaaaatctcagaaattaccactaaggaacttttatccacataaccaaaaaccacatatattccacacactattgaaagaaacataaacattattttaaaaaataaagccacttttaaaattagcaaaataaaataaatatgtcttcagagtttagatattggatccaaattagacagatcaaatactgcctttactaaatattttcatgtcattaacaacttctaaaacctttcaaacagttttttgacatgtcttggaaccatccatttctagctaaggcctgggcacctgtgaaatagggccatgcccccccttatactgggaagagtaagatatttcaagactaagatgttttctacagctccatctttttctttaagctctacatcaaggacataattaaaattggttgtctcctaagtggtttactaaaaatgcatacttaagagttaccattataattaatatttgtatctaaagctacttaaaaattttcacacacaaatctgactgaacaagtaaaatatattttaagtcaaagtttataaaaggacatgagaacatagcttttatgaaaaaattagttttgtcaagtttagaggttttcaaatattttaaattcaggaaataaaataacaaaaagacaaaagaaaatggttgaacaacttagaaaaggtttgttaaaattcatcttataaaacaatctacatgtaaaaagtgggctaaaatttgaaagagattatttaggttttccataaattaatccagaaggggtaggaagtcttaagaatgaggaaggacaggaggaaggggaggtcatcctgacactgcagaggcagaagtgcagctgaaggtatgaaggctaagaggggaggggagtttgagtgctgctgcctggctgtcagagcagaggagggtcctgggcaccagacttgaggaagggatgaaaatgctgggcagacctgtagtgggcccttgagatggcagatagtggtttccagagagagggccattgttttccagtgcccagcactgagcagagagagttttgggcagtgtaaaaaaaaaaagagaacttacctctttctcgttttagaaaaagaacagtctaagaatatcagcagggaaactctcagtgcttcaaggggttaaacgcccttttggctttcttgtgttggtttcatcatagaggaggagaaacttcttggaagtgttcctaaaaacacaacacgtctgcttctcctttcaaaaaaggaagtgctaaaacacgaacactctagatccaaatattaatacggatgtctaaatgcttccgttttccaaggggcagaaagctaaaggttgtaacctattcatttcagtcaaagttggtgaaagggaagcaaaggaactgggtggggcttggaaggatgacgaagctcaagctcattggccagcaacctctctcctgggggcgggaggggtgagcatacgtcattgctttggcttctataaaatgaggaggactcaccgagtgtgaagagtccttctggtgattgcagctgagagcacactcacgacgttctgcaaggattctctgattatgattctgaagggaaaagcgatggaatggacagcagagattgtaattttctttatcttgaattacggaagaaagtatctaggacagaaatccacgacaagtccttggaaccagcagatctcttcgttcacggagacgttgacgtattctctattgaagaagattcttaccttcttactggacaaggttttgtcagttctgcgtgactggattgtccgggagactctgaggaaactgatgtcacatgtttttccaaagaagatgtttctggaaccaacaactgtgattgtggtttgaggacttctgagagttccagtacaggaaataagcagaacatcagctggaggctaaacggatccagacttcactcttcacttcccttcctattcagtctattgtgcctgctgactgagaagcttggctggtatgtgagcaaataaacggaactattcagaaggagatgttgacatattctgtattgaagaagatccttatcttctcacctgacaaggttttgtcagttctgtgtgactggattgtccggaagactctgaggaaactgatgtcacatgtttttccaaagaagatgtttctggaaccaacaactgtgattgtggtttgaggacgcctgggagttccggtatgcgaaataagcagaacatcagctggcggctgaagggatgcagcctccactcttcacttcccttgccattccatctattgtgtctgcctgactgagaagcttggctggtatgtgaggaaataaacggaattataaacaaggagattgtttctcatctacttcattctgttgtggcttttctattttggggttcagggtgtgtgacaaggaccaaggagatgaaaggtttcatgatggagaaagcccaggcaatcagattgaagagctatccacagggaatcttggctgctgaggggctgcaccctgcaacggactgaccatatgacagaaaagggttttaaaggctcaacttctggactgagaacccagagtaatttgggaacctcctctgtgaggagatatgaaagctgggaatcatgacatccctaggaatggaaggcacatttcctgatggaaggggtgctttggaaaacaggagcagagtagacacagcagccttgtggatacgggtgggcagcatgcatgggtgatgtgaacgtggagtgtttgtgatcgaaactcaaaatgtctgacaaagtgaaaacctagaaaccacaatgaggaggaagagtttgtgagggcaatcactctccccatgtgtgaaaatcgggggctcttaaaatctcatctggagaggtgcagtctaccaaactctgggactttagcctccccttttaaaaaaccgtgcatcaataccaacgtccgaaaccacagaaataacacctggcttgcatggagacaaggacaaaaagccgtcatgatgagttgttctgctcacttgctgcctctgttcagtgcacaggatattgtccacccactagcaggctactgcaagagaagtgtgcaatatgttccctatgtgccatatatgtgccatatggcccatatgacaactgagtcagaaaatatctgatgccctcagagttacactccacctggagcttgcccccagccatccaggacctaggctccctaccctgtccaattttctggtgttttgggggcttcattctctaaggtgtgcccactctttactcaaaccaaaacacccacatattcctgcccatgaacaaccaatcaaccacttctcagttccacatcctgctgttgggtctctagtggtgacactgtaactcccaggtcatagtggtgacactataacacctagctaaattgatgccttgtctctaggaggccatgggctcctgcaggtctcatctgactctctgtagccttccctgacaatgctcacaatacccaagccagagccacattgacagcaagctgctctcatcttacctttgccagacctggccactggaaaaggctgaccctcatcctgcaatgcctatacctccaacctttgtctcaagctggtgtcctggagggacttctaagcagaaaacagattcagactcccatcctctcctgaatggcctcatatccaattctcagaccctcagccttcattgtaaggacacttcatccatgcccttgagtattctgtctgcactgtgtattctgcaatagattctcctccctctgcgaccctcaactccttccgcagactttttgttttcttgatcatctaccatagtcttccactgggacactgccaagcccattctggagagtgagttgtgcaagtacactgccccccatctacctttcgggaggtgtatacacccttctttctcccaggtctggaggctttctattttcatcctgaggcatctccacctgctcttggattcttcaaattgacaaccaccagttaacaagaactatgtgtcaccaaatagccaaacaatggcaattacaaaaataaaattaatagctgtaacccccattagcaaggatacacaaatcaaatcagggatagtgggtgaggaagtctgcctaacattcaaggaaggattctgaagtgatacaaaatcattgcctttgctatctttagaatggacactttcagccaggcacagttgctcagcctgtaatcccagcactctgagagccccagttgggtggatcacttgaggccagcagcttgagaccaccctgggcaatgtgcagaaaccccaactctactaaaaatacaaaaatagccagttattgtggcacatgcctgtaatcccaactccttgggaggctgaggcacaagaatcacttgaatctgggagccagagtttgtaatgagcgaagatcatgccactgcactctagcctaggcattagagtgataatctgtctgtggaaaataaaaacattcctcttcaaagttttcttctttaaatcataaatgttggaattaatatatcctctttgaaactcactttcttcaagcttctttatttgatggtagtaaatctttgttaagctttatgaggcaagagtaatggaagaagcatattatatatatttatactctaacctcagtgcttgttctagcaagctcaggcatgcgtgaatgtgcccaggcatgttccagcccataccttatatcctttccttattgggaaatgctgttactcctataagcattcttgtaagcaacttcctctttttctttgtctccactatctttacctattgaggacagttttaggttcttagccagttggatgtagcatagactgtgaggtccaaccccagccaatggagatagcacacagcagtagcgacctcatgcttaacagataaatattcctgtctccctttgtttggggtgctctcagctgatgagcaacaccctttctaaagaaattaaagttgtcttgctgagaaaacttttggtctaaatgctgattcttccttgcagcactgaagaagaagcaattatttccaacactttctcatacacaaaaaaagaagaaggtggaagaaaactttcttgtgcaccctatccctcactcagaaagacaacagaaggctcctagtggcaagccctagaggattcatttcttttgggaaccctcttggctgggatactaggactcaggtcaaactcagcattttcagtgtgtgggaagtgtgcttgggtttcactgttacttccaataatgtgatttggtccttggggttcaccaaattttggtatggagtggtgaaccctgttaagtttaagtgtctataaaattaacaaagcaaaataaccattctgccccatggttcagagaccaaatattgtgtaggaaatgctttagcgagagaaacagagaagaataaaaaatgtcctcaagcgctgcattatttcttgttatcgtccagatcttagaggaaaggctttcattttccctcattcagtatgatattagctgtgcatctgtcatttatggcttttattatgttggggtatgttccctgtgtatgtagttttttcagggtttttgttatgaagtgatgttgaactttatcaaacgtttttcagtttcagttgaaacgatcatatgctttttgtccttcattctcttgatatgatgcatcatgttgatgatttccatatggtgcactgtccttgcatcctgggcatgaattccacttgatcatgacaaatgaatttttaatgcattcttgaattccgtttgctggtattttgttgaggatttttgcatcaatattcatcagagatattggcctgcagtttctttttttttcttttttctttgttttgttgtttgtttgtttgtttgttttgatgtgtctatgtctggttttggtatctgggtagtagtgttccatccccttttattttttagaataatttgaataagactggtgttggttctttaaatatttggtagaattccgaagtgaagtcattgggccccgggcttttctttagtggaaggctgtttattatggcttcaatctcgttacttattattggtctattcatgttttgaatttgttccttatttaatcttggtaggctgtgtgtatctaggaatttgtccatttcttttagattttcaaatttattggcacataattgcccattgtagcctctaatcgtcatttgagttcctgcagtaccaattataatgtctccttcttcatttttgattgtatttatttggatcctgcccctttttttcttacttaggctgcctaataatttcttaattttgttgaactttttcttttgtttgtctcgctctgccaccaggctggagtgtagtggtgtgatcttggctcactggaacctccgtctcccaggttcaagcaattctcctgcctcaccctcccaaatagctgggactacaggcaagtgccaccactcccagctaatttttgtatttttagtagacacgggttttcaccatgttggccaggatggtctcgatctcttgacttcataatccacctgcctcagcctcccaaagtgctgggattacaggcatgagccactgcgcccagcctaattttgtttaaattttcaagaaatcaacttcttctttcattgatttctgtattttttatttccattttatttatttaaactctaagctttattctatcttcttctcattttagctttggtatgcttattgcctctctagctctttaatgtgcattgttagattgtttatttgaagttcttcctctctacaccataagacgtaagcatgtcctcattatgtcataagatgtaaccacttacagctataaacttccttcttagttctgcttttgctgtatctcataggctttgttatgttgtgtttccattatcaattgtgtcagaaatttttcaatatttttcttaatttcttcattgagcaactgatcatttgggagcatatttttaaacttccatgtacttacatagtttccaaaatacctcttgtgatcaatttctagttttattccactatggttcaagaagatgcttgatattatttcaattttttttcacattttaagatgtgttttgtgacctaacatatggtctactttttttttttattaaactttaagttgtggggtacatgtgtagaccgtgcagttttgttacataggtatacacgtgccatggtggtttgctgctcccattaacctgtcatctacattaggtacttctcataatgctatccctcccctaacctccaccctctgacaggacctggtgtgtgatgttcccctccctgtgtccatgtgatctatttttgagaatgatccatgtggattagaatgctgtggaaaagactttggattcctaatatccagggagggagacgatgatattactttcaatatcacacgggtgtacacactctctgtgacattgttcctaatatccagtggaagagaggatgatataacacccagggagggagaggatgatattactcttaatattgcagggtgtgtacccatgcctatgatattgttcctaatatcaggagggggagaggatgatattactcagaatatggcagggggtgtacacacactctgtgacatggttcttaatatacaggggagaatgggacaatattactctcaatatcgcagggggcgtacaaccctgtgatttgttcctaatatacaaaaggggacagtatgatattgttcctaaaatcgcagaaggtgtacaacgccctgtgatattgttcctaatatccagggcgggagaggatgatattacccccaatatcacagggggtgtgcactttccctgttacattgttcctatgatccgagtggggggaaatgacattagtcccaatatcgcaggatgtgtacactactcccccatgatattgttcctaatatcaagggggagagaggaggatattactcccaatatcgcaagggaggtacatcctccatgcaatattgttcgtaatattcaggaggagagaggaagatattactctcaatatcgcagaaagtggacacccaccctgtgatgttcttcataatatccagggaagcagacgattatatgactttcaatatcgctgggagtgtacatcccttttgggatattgtttctaatatccaggaagggagaggattatattacttccagtattgcagccagtgtacacatttcttgtgatattgttcctaatatccagaaagggaaaggatgatattactcccaatattgcaggtggtgtacacccccctctgatattgttccttacatcaaggaaaagaaagaagaatattactcccaatatcgaagagagtgtacacccctcctgtgatattgtatttaatatccatggggaaagaggatgttgttactcccaatatcgcagggggtttacacccacactgtgatattgttcctaaaatccagtgaaggagaaaataatattgctcccaatattgcagggtgtatacaggccctcccccgttatattgctcctaatatccagcggtggagaggatattactttcaatttttgcagggagtgtgtaccccctctctgatatttttctaatatcaaggatgggaaaggatgccattactcccaatatcgcaggaggtgtacatgccctgtgatattgttcctaatatccagggaggtagaggatgatattactttcaatattgcaggggctgtacaccctctatgatgttgttattaatatttaggttgggagaaaatgatatttttcctaatatcctgggaaggaaaggatgatattactgtaaatattccagggagtgtacaccttcctaatattctaatattgttcctaatatccaggggtgggagaggattatattactcccaatatcgcagtgggtgtacacccctcctgtgatgttgtttctaatatccaagcgaggagaaaatgatatcactctcaataccgcagggggtgtacaccttccccatcatatcgttcctaatattcagagggaaagaagatgatgttactttcaatatcgcaggggttgtacacaacccctgtgatatttctcctaatatccaggaagaaagaggatgatattgctcccattatagcagacggtatacgcctccctgtaacattgtttctaatatcaagactgggagaggatgatatcacttccagtatcgcaaggggtgtacacctcccccgtgatattgttactaatatccagggggaagaggataatattactttcaatattgcaggggctgtacacccccgtgatattgttgttaatatttaggttgggagaaaatgatattagtccaaatatcgcagagagtgtacacacttccgataatattgttcttaatatccatgggggagacgatgatattacacccaatatcgcagggggtgtagtctccccttgtgatattgtccctaatattcagggaagtaaacgatgatgttagtgtgaatattccagggagtgtacaccccctttgtgatattgtcctaatatccgcaggagagaagataatattactcccaatatcgcagggggtgaacacaccccctgtgatattgtttctaatatccaagcgaggagaaaataatattactcccaatgtctcaggggatatacaccttccctatgatattgtttctaatattcaggtggaaaacgggtgatattactcctaatatccaggaagaaaggggattatgttactccccttatagcagggggtatacacctcccctgtaatattgttcctaatatcaaggctgggatatacgtggggggaaggatgatattactcccaatatcacaggggttataaaaccttctgtgatattgctcctaataaccatggcggaagaagatgatattactcctaatattgcaggaggtgtacactcccccattatgttgttcctagtatgcagaaaaggagaggatgacattattgccaatatcgcagggtgtgtacaccacccatgatattgttcctaatatttagagggacagaggatgatattactcccaatatcgcagggggtgtacacgcatcccctgtgatattgttcttgaaatcgaggggaaagagaattatatttctctaaatattgcagagggtgtacaccgccccctgtgatattgttcctaatagccgggggcggggggagataattaaattactttcaatatctcagagagtgtacatcccccttgtgacattgttcctaatatccagagcaaaagagaatgatattcctcccagtatcgcaggaagtgtacatttaacctgtaatattgtttctaatatccagggggaagagaatagtaatactcccaatatcgtaggggttgtacaccttttctgtgatattgttgcaaatatttagaagagagagagaatattactcgcaatatcacagggaatgtatacttcccctgtgatattgttctaatatctagaaaaagagaggataatattactcctaatattgcagggggtgtacacccccacttgtgatattgttcctaatataaaggaaggtcgaaaaacaaacggggagcccagggggaaggaaggcaggcgaggaagaggcagcgccggggcgccggagggagcagccgggccgcggaagcgcgagcacgagaccggtcgcggtcgcagtcgcatttttgccgttgtcgcggccgccgccgccgaggcttacccggggatgtctgagcccgcgcctcgcggcccccaagctccacgctgcgcccgctgtcccggcctctaagggccgccacgtccctgcggcgcgcgcaggcagaaagcggcttcgtgccggcggagggggcccgggcgggccgggaaaggctgccccaggccccgcgcctaccccatcaccgcggccggcgccgggccgggaggatgagcggtgtggggctctgaagcatggagggggttttgtacaagtggaccaactatctcacaggttggcagcctcgttggtttgttttagataatggaatcttatcctattatgattcacaagatgatgtttgcaaagggagcaaaggaagcataaagatggcagtttgtgaaattaaaggtgacagctttggaggggaccacccttgattggatacataaattctgttcattcagcagacaacacaagaatggaattaatcattcctggagagcagcatttctacatgaaggcagtgaacgcagctgaaagacagaggtggctggtcgctctggggagctccaaagcatgtttgactgatacaaggactaaaaacgaaaaagaaagaagtgaaaccagtgaatcgctgaaaaccaaaatgtctgaacttcgcctctactgtgacctcttaatgcagcaagttcatacgatacaggaatttgttcaccacgatgagaatcattcatctcctagtgcagagaacatcaatgaagcctcttctctgcttagtgccacgtgtaacacgttcatcacaacgcttgaggaatgtgtgaagatagccaatgccaggtttaaacctgagatgtttcaacggcaccatccggatcccttagtttctcctgtgtcaccttctcctgttcaaatgaggaagcgttctgtcagccaccctggttcttgcaccagggaggagtagccactgtataaaagaaccagtatctgcacttcaccgactctcccagcgacgccgaagaacctactcagatacagattcttgtagtgatattcctcttgaagacccagatagacctgttcactgttcaaaaaatacacttaatggagatttggcatcagcaaccattcctgaagaaagcagacttatggccaaaaaacaatctgaatcagaagatactcttccatccttctcttcctgaagaaactgtagtgtccaactttctctaagtattgctatgcaaaagctgctgtaattgaactattgttatagggagtagttttttcccttaggactctgcactttatagaatattgtaaaacagacaaacaagaaaacaaaccacatacttttgaagcgtgttttatctttatatagtttgtttgcaagagtattttcctaataacttcacagtatgaatgtgcatcttttttttctttttttaacaaatgatggtgtaacattttgacatccataaggacaaatgtagatatttttctaaaaaaccgtgaggggactgacagcttggtcagggtgtattgtagcttataaacatgaaatcttacaaggtttcagtttgacagaagtgtgatatatgtaacttgtgccatggaccaaatggtcactttaccacagctaaaaatgagttatgatagcagcttgatggtgattgcattgtattcctttaatcaaaaaggaaacgcaatattctaagtatctttagcccaaataccatgacatattgagcatctttaaataaccagactgtattgtccttcatatgtgaagttgacactactgatttgtcaataccaaattttgggttaaagtgtttaatttttatttatttattttcttgttgcctcaaaagatgattgcattctaacttttgtgacctaccaaatttaagatgtgtatacattgttctttacgttgttctagaaaagagattttaatgctgtagtgacttagctcacttacatcagagaaataaacaactttcaatggaaaaaaatatatataaaggaaggaagaggatgatattacttctcatatagaaggggttgtacaccccccttgtgatattgttcctaatattcagggagggagaggattatattactcccaatatagcagggagtgtacacccccccccccgtgataatgttcctaatattcagggaagcagaggatgatattactttcaatatcacagggggtgtgctgtccccctgttatattgttcttaatattcaggggggagaggatattattatgcccgatatcacaggagaagtacaccccacaagtgatattgttcctaatatccaggggtaaagaggatgatatcgcaggtggtgtacacccctccccgtgatattgtttctaatataaagaaggagagagcatgatattactcccaatatcgctggaggtctacaccccccttgtgatactgttcctaatatccaggaagggaaacaatgatattgctgtgaatattccagggggtgtacacccctttgtaatattgttcctcatatccagggggtagagaggatgatattactcccaatatcgcagggggtgcacggccccactgtgatattgtttttcatatccaggaggggagaggatgacattactctcaatatggcagggggcgaacaccccctgtgatattgtgctagttaggttgggagaaaatgatattactcccaatatcgcagggggtgtacaccgctcctgtgatattgttcctaatatccatgacgggagaggatattactcccaatatcgcagggggtgtacctctcccctgtgggattgttcacagtatccaaaagggaagaggatgatgttactcccaatatcacagggagtgtacaccaccattgtgatattgttcctaatagccagggaagaaaacgatgatattattgtgaatattacagggggtgtacacaccccctgtgatatggtttttaatatacaggttggaaaaggatgatattactcccaatatcacaaaaggtgtacacacccccccatgatattgttcttaatacttcggtggggagaaaatgatattagtctccatatcacaggggtgtgaactcctccggtgatattgtttttaatatcaagaggggaggagatgatattgctttcaatatcgctgggggtgtacatccctcctgtgatattgttccttatatccaggcgaggggaaaataatattactcccaatagtacacaccccatgtggtattgttcctaatactcagggggaaagaagataatattactttcaatatcacagggtttgtacacctttcctgtggtatagttttcaatatccagggggaaggtacatgatattactcccattgcagcaaggggtgtacacacctcctgtgatattgttcctaatatccagaagtggtgaggatgatattactcccagggggtgtacaccccacctatgatattgtttctaatatccaggggaaaagagtgtgatattatgcccaatatcgcagagggtgtacacttatcctgggatattgtttctagtatttggggagggaggagaggatgctattattctcaatatcgcagaaattgtacacccccgctgtgatattcttcataataatcagggaaaaagaggatgatattactaccaatattgcagggggttacacttcccctttggtagtgttcctaatatccaggaagaaagaggatgatattaatcccattttccaggaagtgtacacccaccgtgtcatgttgttcctaatatccagcagggaagaggatgatattactcccaatatcggagagggtgtacacttcccctgttatattgtttctaatacccagggggaagaaggatgacattactgccaatatcacagggtgtgtaccccaccctgctattgttcctaatattcaaaaggaaagatgaaaatattactcccaatatctcagggtgtgtacacctctcctgtgatatcgttcctaatatccacaggaagagagaatattactctcaatattgcaggggggtgtacacccccctgtgatattgttccaaatattcgggcggggagaggatgatattagtcccaatatcgcagggggtgtgcaccaacctgtgatattgttcctaatatccatgcgggggaggacgatatcactctcaatgtcgcaggaagtgtacacctctcttgttatatttttcttaatatccaggagggaaaagatgatattactgccaatatcgcagggtgtgtccaccccccttttatattgttcctaatatccaatggaaaagaggatgacattgctctccatatcccagaaggtgtacaacgcccctgtaatattgttcctaatattttgggggaagagaggatgatataacttataatatcacaggaggtgtacaccacccctatgtattgttcctaatatcctttaagggagaggatgatattactcccaatatctcaggtggtgcctattccccctgtgatattgtttttaatatccaggggaagagagtatgatattacgcccaatatcgcagggggcatacaccctctctgagatattgttcataatatatagagggagagaggatgatattacttccaatatcagaggtggggtacaccccccggttatattattcttgatatccaggaggggagaggttgatattactggatatatagcagggagtgttcacatcttctgtgatactgttcctaatatccagaaaagtagaggatgatattactcccaatatcgcagaacgtgtacacctccctgtgatattgatcctaacattcaaaggggagaggatgatattactcaaaacatcacagggcatgtacactcccctgtgatattgttcctagtatccagaagggagcaagataatattactttcaatatcgcagggggtgtacacccctctttggtatgtttcctaatatccagaaggaaagagggtgctattactttccatattgcaaggggtgtacacccccctgtggtatggttcataatatccagggagggaaagggtgctattattccccatatcgcgaggcatgtacaccctgctgcggtacggttcctaatatccagggggaaagaggatgctattacttcccatatcgcggggtgtgtacacccccgtgtggtatgttttgtaatctccgggaacgaagagggtgttattacccctcatatcgctggaaatgtacactcccctgtggtacggttcacaatatccaggggattgagggtgctattactccccatatcgcggggggagtgcacctccctgtggtatggttcgaaatatccagggtaagagagggtgctattattccccattttgcaggaggcgtacacccctctatggtatgttttgtaatatcccaggtaaggggtgctattgagagaagagagcaaaagaccccccccatattgttctgtattattttatactcagtacctgttttaagaagaaacaaggaagcgaaaccaaaggcaggcagcccggcgccaggcaccagatccaaaaccagacccgaaaccaggcctgggccttcctgaccttagcctgaaagttaaaattcaacccatgacctagcaactgatgttatccatagattccagacattgtatggaaggacattgtgaaatttcttgttctgttctgtttcactctgagtactggtgcatgcagcccttgtcacatacccactagattgctcaatcaatcatggccctttcatgtaaaaaccttagtgttgtgagcccttaaaaaggacagaaattgtgcactcaacaagcttggattttgatactctagtctgctgatgcttccagctgattaaaagccacttccttcactacctcggtgtctgtgggattttgtccgcggctcctcctgctacactgtgactccccttatagagaggggtgtacacccccctttggttcctaatatccagcgggggagtaggtgctattactccccatattgcggggagtgtacacccccttgtagtacggatcgtaaaatcaaggagggagagaaggtgtaattatccccatatcacagggagtgtacacccctttgtggtatagtttgtaatatccacgacgggagagaatgctattactccccatatcgtggagggtgtacaccgccctgtagtatggttcgtaatatccggaaggggagaggttgctattactccccatatggtgggaagtgtacacccccatgtgatatggttcataatatccaggggggtagaggatgatattacccacaatatcatagaaggtgcacacccttttgtgatattgtccataaaatccagaaggggagaggatgatattacttccaatatcacagggggtgtgtagccccatatgatattgtttgtaatatcaaggtagggagaggatgctattccttacaatagctcaaggggtgtaaccttcttgtgatattgtttgtaatatccagaaggggagaagataatttttttattttaaaagtaaactttaatgtcaaaaatgcaaacttgagaagggcagaaagatcaaacagaaggctgccacttcacaattggagggttgcacagtggccgggcagaggcgctcctcactccccagacggtgaggcagccgggcagaggtgctcctcacttccgagatgttgcaggagccgggcagaggtgctcctcacttcccagaacagggggctgccgggcagaggtgctcctcactgcccagacggtttgcaggcctggcagaggcactcctcacttcccaaacggagcagcggcaagccagaggcgctccacacttcccagatggtggggcagccgggcagaggcgatcctcacttctcagagggtagggcggcccagcagaggcgctcctcacttcccacatggtggggcggcaggctagaggcgatcctcacttcccagacggtggtgtggccatgcagaggtgctcctcacttcccagatggtgtggccgccgagctgaggcactcctcacttccctgacagtggggcggctgggcagaggcgctcctcacttcccagacacttggactccgggcagagactctcctcatttcccagatggtggggctgccgggcagaggcgctcctcacttcccagacggttcagaggccgggcagaggcgctctggggagaggataatgttactcccaatatcgcagggggtgcacactccctgtgatattgttccgaatatccagagggggaaaggatgatatagctcccaaaatcgtggggagtgtacacccccctgtgatcttgtttgtaataccaagaagaaaagagaatgctattatttccaatatagcagggggagtacaaccccctgtgatattgttcgtaatatctagggggagagaaaattatattagtcttaatatctcaggggacgttcatccccctgtaatattgttggtaatattcagaatggagaagatgatattgttcttaaaatacaggaaaaaatatgataatattacttccaatatcgaagggggtgtacactctcctgtgatattgttcccaatatccagaatgaaagaggatgctattactcccaatatcccagggagtgtacacccctttgccatattgttcataatatccaggggaagacaggataacattactcccaatatcaccgggggtgtccacccactagtgatatttattgttcatcatatccagaaaaggagaggatgatattactcccaatattgcaggtggtgtacggtccctgtgatattctttgaaatatctagaaaaggagaggatgatatcactccgagtatcacagggggtgtacacccccctgtgatattgttcgtaatatccaggggagaaaaggatgatataattgccaatatttcaggggatgtgcacctccctgtgatattgtttgtaatatccaggggtggagaggatgatattactcaaaataacgtaaacatcctgtgtgtacatcccctgtgatattgtttataatatccaggggggtagaagatgacattacccccaatatcacagagtgtacacacccctgggatactgttcataatatccaggcgggaaagaatgaactacttccaatatcgcaggatatgtacacccccctgtgatatatttcctaatatttatgtgggtaaggatattacccccaatatcacagaaggtgtacatcctctttgtgatattattcctaacatccaggaaaggagagaatgatattactcccagtatcgcagggggtgtacaccacccctgtgatattgttgctaatatccagggggagaggataatattactcccaaaatcacaggggacgtacactcctcctgagatattgttcctaatattcatggggaaaagaatgctactactccaaatacagcagagggtgtacaccatccccgtgatattgttttttatatccaaagggtgaaaggctgatattactcccaatatcgcagggggtgtacaggccccccatgatatcattcttaatatccagggaggcaaagaatgatgttactcccaatattgcaggctgtatacaccccccgtgatattgttcctaatatccagagtaagagaggatgacattgctcccaatattgcaggggttgcacgcacgccctgtgataatattactcccaatatcaacagtgggtgtacactcctcctgtgatattgtttgttatatctaagaaagaagaggatgatattactgtcaatatcacagaaggtgtacagccccttgtgatgttgtttctaatatccagcggtgagaggatggtattactcgcaatattgtagggggtgtccaacggccctgtgatattgtttctcatattcaaaaaggaaaagaataatataactccaaatatcgcagggtgtgtacacttccctgtgatattgatcctaatatccaggaagagagaggatgatattaatcccaatatcacagggggtgtacatcgcttctgtgatattcttcctaatatccagggggggaggggatgctattactcttaaaatcgcagggaacttacactcccactatgatatttttcctaatatccaggaagggagaaaatgatattactcctaatatcacatatcacaatgggtgtacatctccccgtgatattgtttctaatatcaaggatgggagaaaattatattactctcaatatcgcagggggtgtgcacacctcctgtgatattgttcctagtatccagcggaggagatgatattactttaaatattgtagaaggtgtacaacccccctttgatattgttcctaatatccagggggaaaggagatgatattactcctaatatcgcaggggctgtacaaccctatgtgatattgtttcttctaatatccaggggtggagaagataatattactcctaaaatcgaaggggacatacactccccctgtgatatttttcctaatatccagaaggaaagaggatgatattactcctaatattacaagaaatgtatacctgtcctgtgatattgttcctaatatccagaggggtaaatgattatattactcccaatatcgcaggggtgtacaccttccctgagatattgtttctaatatgcagtggaggagaggatggtattactcccaacatcacaggagatgtaaactccccttgtgatattcttcctaatgttcaggacgaaggagggtaatattactcactgtattgcagcagggggtgtagagccccctgtgatattgtttttaatattcaaggttggagaaaataatattccttccaatatcgcatggggtgtacacccttctttttatatagtttctaatatctggggggagaggatgatattactcccaatatcgcagggggattacacccccactgtgatattgtttttaatatccagggtgggagaggataatattactccaaatatcccagggctatacaccctccgtgtgatattgtttctaatatccagaggaagagaagatgatattactcccaatgtcacagggtgtgtacaggccttctttgatattgttcttaatatccatgagggagaggatgatattactcccaatatcgcaaagactgtacaccctttctgtgatattgcttccaatatccagggagggagaggatattacactcaggatcacagggggtgtacaccccaacctgtgatattgtttctaatatctagggaaaatgagggtgatattactatcaatatcacaggaggtgtacactcccttatgatattgttcctaatatccaggagaatgacaggataatattactcccaatatcgcgggtggtgtctccccccactccgtgatattgttcctaatacccagagggggagagaatcatattactcccaatatcgcaggggatgtacacctacatccggcggagtagaagataatattactcacaatatcgcaagaagtgttcaccttccctgttatattgttgctaatatccagggagtgagaagatgatattactttcaatactgagcgtgtacactacccctgtgatattgtttctcatatccagtagaggagaaaatcatgttactcccaatattgcaggggtgaacacctcctttgtgatatttttcctaatatcaggaaagggagagtatgatattacccttaatattgacaggggtgtacacccccctttgatattgttccaatatccaggggggcagaggataatattattcccaatatcgcagagggtgtacaccccccgtgatattgttcctaatatccagagaaataaaaaatagtattatttccaatatcacagggcgtacattttccctgtaattttgttcctaatatctggggggtggggtggcaggataatattactctcaatattggagagggtgtacacccccctgtgatattgttcctaatattcagggtgggagagaatgatgttactcccaatatctcaggagtcgtatacacccccttgtgatattttttctaatatccaggaggcagaggatgatattgctcccaatatcgcagggggtatacacccgagctgtgatattgtttctaatatgcaatatgggggaaggatgattttactttcaatatcgcagggaatgtacactttccttgtgattttgttcctaatatccaggggtggagaagatgctattactatattactcctcatatcgcaggcggtgtacaactccctgtgatatggttcagaatatccagagtgaaaaaggagggtgacattactcccaatatcgggggggtgtacacccctttgtgatgtggttggtaatatccaggggggcagatgagggtgatatcactccccatatcgtggaaggcgtccacttttttgtgatgtggttctttatatcccgaggggagaaggtgatattactccccatatcgcgaagggcatacacccccctgtgatatagctcataatattccggagagtggaggaagatactatgccctatatcgcgggtggcctacaaccccctatggtttggcttataatatccaggggggagagggtaatattgctccccatattgtggagacgtacagccccctgtgatatggtttgtaatatctttggggggcgagggtgatattactccccatatcgcggggagcatacacccccgtgatctggttcatagtatctcaaaggaagaagttgatgtgtacaacttaagggaaaaagttgaagtgaagtgtacacacgccctgtgacgtggttcataatatccaggcgggggagaggagagtgatatttactccccatatcgcgggtgttgtaaactcccctgtgatatagttcataatatccaggggagagaggagggtgatattgctcctcatatcgcgaagggtgtacaaccccctgtgatatggttcataatatccagaagggtagaggacgatgatattactccacatatcttgggaggtgtgatatggttcgtaatatccagcgatgagagaatgatattactccccatatcgcaaaaggtgtgatagggtttgtaatatcctgagggggagagggtgatattaatccctatattgcagaaggactacaccctcccatgacatggtttgtaatatcccagggggtagagtgtgatattactttccatatcacagggggtgtgatatgattcgtaatattcgaagggggagagggtgacactactctccatatcacggggtgtgtgatatggttcttaatatcccaggggttagaggttgatattaccccctttttggggggtgtgtacaccccctgtgatatggttcgtaatatcccgggggagacagggtgacattattccccatatcgaggggatcgtacaccccctgtggtgtggttcataatatccctagggggagatggtgatattactccccatatcagggggcgtgcactcttctgtggtataattagtaatatccagggggcagaggtcgatattcgtttccatatcatgaagggagtacacttccctgtgatatggttcctaatatccaggggggagagggtgatattattccccatattgcggggggacatacaacccctgtgatatggttcataataaccagaaaagaagagggtgatattaatccccgtattgcagagggcatacaccccccctgtgatatggtttgtaatatctaggggaggaaaaggtgatattactttccatattgctgggtgcagacacccctttatgatatggttcataatatccaagttggagagggtgatattacttcccatatcatgggaggtatacccttccctgtgatatggttcgtaatatccagaaggggagagattgatattactccccatattgtggggggcgtacaccttcctgtgatacggtttgtaatatctaggggatatagtgggtgatattactcaccatatcacgggggttgtaacatggtttgtaatatccaggggaggagagggtaatgttactccccatatctcggggcatgtacaccctcctgtgacatggttcgtaatatccaggtcgggagagggtgatattactcctcatattgccgggggtgtgttatggttcataatatcctggggaaggaggctgctatcactctccacatcttgggggatgtacactctcctgtgatatggttcataatatccagggtgggtgagggtaatattactccccatatcgcgggaagtgtacatacccctgtaatattgtttgtaatagaagagagggtgatattactccccacatcgcgggtggtgcccacccccctgtgatatggtttggaatatccagggggatgaggagggtgatattactccccatatctcggtgggagtacatccctctttgatcaagttcataatatccaaaaggaaacaggagagtgatattactccccatatcgccgggggtgtacacgggagggggagtacacccccggcgatatggtctgtaatatccagggaaggagaggagggtgatattactcaccatatcgcaggtggtctacatttacctgtgaaacagtttgtaatatccagggggggaaatgagaatgattttttttttttgagtctcactgtgtcacccaggttggagtgcagtggcacgatcttggctcactgcaacccccgcctcctggactcaagcaattctcctctcccagcctcctgaatagctgggactacaggcgcaccccacaacgtctggctaatttttgtatttttattagagacggggtttcaccatattggccaggctgatctcgaactcctgaccctgtgatccatccgcctcggcctccaaaagtgctgagattacagatgtgagccaccacgcatggcccaaggagaacgatattactccccatatcccagggggtgtatatccccctgtgatatggttcagaatatccggaaggaaagacagggatattacttcccatatcgcaaggggtgtgacatggttcgtaatatcccatgggggagagggtaatattactcttcgtattgtgaagggcatacactcccctgtgatacagttcataatattccggggagtagaggaagatattatgctccatatcgcgggtggcataagccccctgtggtttggttcataatatccagggaggagagggtaatattactccccatattgtggggacgtacaccctcctgtgatatggtttgtaatatcccagaggggagagagtgatattactccccatattgcagggacatacacccccctgtgatatggttcaaaatgtcttttttttttgaaggactggttctttatttcaaaaagacacttgtcaatattcattatcaaaacagttgcactattgatttctctttctcccaatcggccccaagtagaccacatcaaaggagagtacatattaagccaataagctgtaggatgtacacctaacagacctcctagaaaccttaccagaaaatggggacagggtagggaaagaaactttaaaagatcaacaaactgccagcccacggactgcaggggctgtcacagccagatggggtggccagggtgccacaaacccaaagaagcaaagtttcaaaataatataaaatttaaaaagttttgtacataagctattcaagatttctccagcactgactgatacaaagcacaatgagatggcacttgtagagacagcagcttcaaactcagaaaagggtaatgagatgagtttcacatggctaaatcagtggcaaaaacacaatcttctttctttctttctttctttcaaggaggcaagaaaagcaattaagtgctcacctcaacataaggggaacatgatccattctgtaagcagttgggagggggtagagatggaacaaaattttggtctcagaggtcttgccatcttaatttggtcacttctaatgaaaaaaataaaaaatagaaataacattatccaaaggtatcttaaagctgaaaacttgaacagcacattttttgttgttgttgtttggctaactcctcctggaaccacctttctggcttagctagtactttgtacagagcaatgaggcttcccatagtggagtctccctgggctctgtttggctctcagcaaggcaggcctataccttttcctctcctccatggagagaggaatatgcattaaggtgaaaaatcaccttccaaaagtgagaaagggattcgatcgctgcttcagggctgtggtattatatggaatgttttacaaaaggttgctacaaaacaacaaaagaggtaattacaaaatgtgtacatcacaacatactttttaaagacattatgcattgtgctcacattcccttaaatgttgtttccaaaggtgctcagcctctagcccagctggaatctccgggaagaggcggacagtttggtgaaaaagacacagggaaggagcgggcggcggaaggagggggcggcgaaaggagaaagcagccttccagttaaagatcagccctcaattaaaggtcagcttcgggcaggctggcctcaggcggagtctggttcagagggaggagcagcagcagggtgagactgaggcgttctacatctcattcaggtcaagcagagtctggtccagcatcctttgtgtacagaggtgctcccctttggtgcatttcagtttatcttccaagtcatcaattgtcttttccagcttggctaccgatctctcagcaaactcagcatgggtctccgcctcctttattttatcagtaagaatcttgatctcttcctcatatttgtcttctttttgagagtacttttcttcagcagcactcagacacttcaggttctggtccatcagtctaatctgctcatccatctctcggcaaagggattctgccagctcagctcgttcctctgtgcgttccaagtctccttcaatgatcaccaacttacgagccacctcttcatacttcctatctgcctcttctgcaatgtgcttagcttctctgagttggatttcctggagttccatcttttcttcatcttttaaggcccggttttcaataaccttcttacctctctcactctcatcagcagctttttccgcttcttccagcttttgcagggcagtagccaggtgctcctgagcacggtccagctcctcttcaaccagctggatcccacgttcaaggaggccacctcagcctcagcctgttcccgggcccacctttctccctcaacttctcgctggaggcgctcagctcgctcctctgcatcatctgcctgctgctgcagaacctggatcttgcgcttcaccgcctcgatggtggtgatcccagccatggtgcccacccagctactgctagagctccggttcctgcctcctccgatcggcgttgcagcctcctctcacccttacttccgcctcggttcaaaatatcttaagggaaggagttgatattactccccacatcacgggaagtttacatcccctggtgatatggtttgtaatatcccagggtggatagggtgatattactctccatatcgcgaaggagtactcccccctgtgatatggttcataatatccttggggggagagtgtgatattactccccatatcgcgagggccatatactcctttgtgacatggttcgaaatatcccggtgggggagggggtagagggtaatattactccccatacagcgaagagcatacgcccttctgtggcaaggttagtaatacttcagggaaaagagtgcaatattacttttcatattgcagggaacatacactcccctgtgacatggttcgtaatatcccgggggctgagagggtgatatttctccccatatcaccgggggcctacacctgggtgtgatatggctcataatatacagggagggagagggtgatattactccacataccgagtgaggggttacacaccctcgtgacatgttcgaaataccccaaggaggagacaatgatattactttccctgtcgcgggggctacaccctcccagtgatatggttcacaatatcccggggtggagagggtgatattactccctatatcaccggggggtgtacacttccctgggaaatggtttacagtatccccggggggagagggtactattactccccatatcacgttacatatcagggtacacccccacgtgatatggtttgtaacatcccaggaggaagaaaatgatattactccccatatcgcggtggcatacacccctccccgttaaatggttcataatatcttggggtggagagggtgatattactccccatatcacgtggggcatacaccccactatgatatggttcataatatcccggaggggagagggagatattactctccatgtcgcggggggcatatacacccctgtgatatggtttgtgatatcccgggggcggagagggagatattactctccatatcgtggggtcgtacacttttctgtgatatgattcgtaatatccagacggggagagggtgatattacttcccatattgcgggggcgtacacccctctgtgatatggttcataatatcccgaagaaaagagggtgatattactcctcatatcgcggggaacacacaccaccctgtgatatggtttgtaatattcagcgggggagagagtaatattactccctgtatctcggatggcgtacactcccctgtgatatggttcataatatccagaagaaaagagggtgatattactccccatattccagggaatgtacaccaccctttgaatatggttcgtaatatccaggaggggagagggtaatattgctcccaatatcgaaggaggtgttatacggttagtaatatccagagaaggagagggtgacattactccccacatcgtggtgggtgtgcacccacctgtgatatggttcataatattcaggttaagagaggtgatattgctttccatatcgccaagggtgtacactcccgtgaaatacagttcgtaatatccaaaaggggagagggtgatattactcccatatcgtggggggtgtacacccctctgtgatatggttcataatatccagggtggaataaggtggtattactccctgtatctcggggcatgtacatcgcctgtgatatgattcataatatccagaagaagagagggtgatattaatctccatattgctgggggtgtacaaccccctgttgtatggtttgttacactgagttggggagagggttacattactctcaatatcgagtggggcatacacacttatgtgatatggttcataatatcccagggaggagagggtgatattactccccatatcgcgggaggcatacaccccaatgtgatatggtttgtaatatctacatttttttttttgagacgaagtctcgctcttgtcccccaggctggagtatgatggccggatctcggctcactgcaacctcagcctcccgggttcaagcgattctcctgccttggtcccccaagaagttgggattacaggcgcacaccaccacgcccggctactttttgtatttttagtagagaaggggtttcaccatgttggccaggctggtctagaactcctgacctcagatgatccacctgcctcggcctcccaaagtgctgggattacaggcgtgagccactgcacctggcctggtttgtaatatctatgaagggggaaggtgatattactttccatatcacgggaggcgtacaccacgatgtgatatggtttgtaatatccagggggtatactgggtgatattactccccatatcgcggggagtgtatacccttttgtgatatggttcctaatattaagctgaggagaaggtaatattactccccatatcgcaggggtttttatatggttcataatattcaggaagagagagggtgacattactctccatatcacggggtgtgtactcccccatgtgatatggtttgtaatatccagggaaggagaggttaatattactccccatatcgcagggggtgtacacctctctgtggtttgtaatatccaaagggaagaggatgatattatcttcaatatcttggggggatacagtccccagtgatattgttcataatatccagagggggaggggatgatattactcccaatattgcaggtggtgtacaaccccctgtgatattctttataatatagagggggatgatgatattactcccaatatagtaaacaacctgtgtgtacaccccctgtgatattgtttataatatccaagggtggaaaggatgatattactcctcatatcgcagggggtgtatacccctctgtgacattgttcctaatattcaggggaggagaagatgatactactcctcatatcacaggggatgtacacccccctgtgatacttttggtaatatccaggggaggagaaaattatattattccccatgtcacagagggtgtacaccccgctgtgatagtgttcataatatccaggtgaaaagaggatgatattactccgaatatctcaggaagtgtacacccttctgtgatattgttcataatatccaaaggtggagaggaggatactactccccatatcgcagtgggtgtacacccccctgtgatatggttcataatatccaatgtaggagaggatgatattactttccatatcgcggagagtgtacatccccctgttatattgtttgtaatattcagggagaaagaggatactactactccccatatcacacggggtgtatattcccctgtgatatggttcctgatatccaagagatattataatcctctcttggattatgctacctctcatatcgcatggggtgtacacacactttgtgatatcgtttgtcatatccaaggagggagaggattatattaatcccaagatcacggggggtgtacaccctcctgtgatattgtttgtaatattaaggggggagaggataatattactcccaatataattaacaccctgtgtgtactcctccttgtaatattgttcataatatccaatgggggagacgatgatattactttcaatatcgcagaggatgtacatccctttgtaacaatgtttgtaatataaaaggcaagagaggatgatactacttccaaaattgcaggacatgtacaccccccggtgatattgttcctaatatccagtggggaagaggatgatagtagtcccaatatcgcaaagggtgtacacaccccctgggatattgttcctaatataaaaggaggagaggatgctattattcccaatatcacagaaggtgtaaaatcccctgtgatattgttcgtaatattcaggaggggagaggattatattactcccaatatcacagggtgtgtacacagggaggggcaagggccagaagcgggcgggaatccccatgtttgggcggacccagtttctaatggccagcatttgccaatcaaagcttaccagagaactctaaaagccagggctttcctgctagacaagactcatttctggaactgctttaaaaagaaacaaaacttcccaaggaccccttttcctctctgtctgcctaaaataatgttttaaaaactcctaaagcagctgaattcagcccccttcctgggggaatgtatagacggaactcccacctttcccggcatcccaaggccagagtatgtgaaactcctgggtctctatgtgtgtctgagcggctgctctgccaacactccacacagccctgtgtcctggacccaaggcccttatgacctgagctcaagaggggatctcctgatccatgggttgcaaagatccatgggagaagcatggtttctggggcggggtcacacgctcagtcactgtttccctcggatgccggagatggttcctttggctctctgccaatacagggtgaatcatcatccatccctcttttctttgttctcccgggtcaagttgtttgcctagtcagtcccaatgtgagaacctgaatatttcagttgacgcgctgacttcaaaatccccgggcttcgggaggcggagcttgcagtgagccgagatcccgccactgcactccagcctgggcgacagagcgagactccgtctcaaaaaaaaaaaaaaaaaaaaaaaaaaaaaagtccccgggcttttcttttcactcagtggaaggcagctgcttctaattggccatcttggcccgcccccaccacgtgaccttctgtaaaatgcctccactctccaggaacgctctcattatataactttgcctgaaaccaacagcacgctcattgcacatatcatgggctcatttatttcacttataaagaacctggccaaggaagagatagtgcctaaagtggccagtattctgaccgatatgttagaaaaatggtgtgccgaccaattcatgacatgtgtcccaaaactagcaacggaaattgtattcgccgtgttgaggtctctaatccagatgatgctcatctatgtactggaaaaggcagagtcctttcctgacaagctgctgaaactcttcagaaacatctcatatttcctgaagaagatgatgtctggacaagcagcacaggtcgttcagatttaactttctattcatatatccagcacgatattcgcacaattgtcacgaaaccttaccagttgatgagtcctgcacatttcctttaatttcaggaggaagagggtaatccggatgagttttctgacctactctgctgctgtgattaaacaaccaccaggaaattttgacgacactgttctcctgagctcctccctttcctccgggaacaaaacaattgaatttacaaaaataaagtgttatttgactggagtgaggtctcatgtctgcttatgcggtggctcgctgctcagaacagggtgagtctctgggttgtgtgctgaggaggggaggctctcaatctggagaaaacccactgcaggggacacctccatggggtctgagggactgaggatgaggagccggactgggtctagggaaggaggaggtttcagagggtgaaattctggcactaaagcctgggggtgtttgggaacttcctccttccgaagaagtttcagggagggataaagacaaaccctgggctccttgaggggcccttactaatttgagaggactctatcgggaaggagagtgacaatggcctccttgaggactgaggcccctgaataaatgaggcccagatacagtccatgggggatgagaccttcaagggtcacattttggttgggacagaggaaaagtgcagctctgcagccgcagaggaaaacccggcagtgtgaaagcgaccttggaggggccctgtgcgctctgaatgcgtctgagcccccatcccctgtccccgcctctctttctggattcttccagctcggctgtctccgccatcttctgagcgctccaccctgacttattcaagtttcccttctgccttccaagtactccaaaatctttcagatctgtgtccctacccctgtttttagcatgtgttggggctccaggtccctgaaggtttctggcctgaaatccacctccccagcggagtggactgcgttctagagactccacactccgcgaggttcccaggcccctgagggacaaccgagtggcctgcgcacttcagggctccacactcggcaaggtctttcaagcccttggggtccccttcttagttttttccacctttctgggctgcagtcactccataaatgctgggatctgatccccacccccactctcgtttcctcaattctgcgggctacacgctctggcaaggtcctccgggccctggatcccctccctctccctatgcccacgctcctagtcagcccttctggggtccactattttcaggaactaaccgttctcatggagccttgctaaccggaaagctgtgtggaagaaaggctttgaggatagaggtggagatttggctcttccatagtgccactcacccaccccaccatgctgccactgccagacccggacccctgtttcagaacaagtgaccagattcgctcctggacagccctggacactggccttttctctgaaaactactcaccctttctctagtccccacttcatgccagcctcataccctcttccttcccccacgctggcttccgggatcctcctctgctcagacaacctcttctgtgtcccacccccgtttttagaatgctttggggcaccaggttgggggaaggtttctggcctgatatccatctctttccaaactcccttcttcccttgaaaggcttcttgccttcagccccacttctggctccgaggtttcaggacaccctcctcttcatcctcattcttttgaccaccagctttttaggaattcgaacgtccctctcatcttcgtgaatcctgtccaggcatttgttgaccccttcatctgatacccctgacctcacattgccaaaagtctacccctacccagtacactggaattagacaaaatcccaggagttttacctcaactctgagtgtgcccacaggagctctccctgaagccacgtccttttaagcagggtctagggttcctcccttgtcttaatgaactctttgtcacacggaggacgttatggagcccttatgatctttcactgcctttctgcccagcgttttgtctttccatggacatttataatattttccatggacattttgttctctcaatgtccacccctaatttccaacatcccaaagattctcatgtgtttcctgaaagccatttacaggaatggctgtgcccagacccccttccccaggatcctccttcacacctggtaggtgcctctcctagagagatttgcactcagttgtcgtgcagtcacatggcccagatggttgttaatcacccccttcctggcaacagctagcagccagggaatcactggcacagaaacctcagggtgaccaagatgaggccacctctgtgctgaaggctgtgctccagagcctgcttgggatcaggcttaagcaggtcttcagccagacctgatgttacctggtttccttgagctgccctgcctgagctatcgggagcactccctcaatgcacatcttgattccctatctcatgctctgcttctagaaaccatgagctatcaattgctactggcaatggtcctgggaagtcaaccctaagtatggattctggggttggatgactccccacaggacttcagtgagcaacaatcactgctggcagttggaggacagagtcgctagggcatgtgaccactgtgaaaccaccgatgtttcacctggggtaattttggatgaactacggtagaagcactgaaggtacattgcttttggtttggaagattgtaggtaaataatagcgatatgaatgtggaattggatggctgcaaacgagtgccattgatgcattgaaagaggaaaagtcaggctgtcacctgtcactcagcaatttaaagtgtgagagttgggactagatgtggtggctcacatctataatccagagattcgggggaagcttgaagaggtaggatcttttgagtccaggagttccagaccagcctggacaccagagcaagacctcatctctacaacaaaattttcttaaaaattagatgggcttggtggcacgcacctgtacttgtagatctagctaatggggagcatgagataaaaaaatcacctgagtcagggacttaggggttacaatgaggtatgattgtgccagtgcacacactcccacctggccaacagagtgagattctgcttccaaaaaaataagaaataaatcaggtttgagagttggaaagcatcatcttctcctagagccaaaggacatgtacaactgagacccaggaacaaagcttcatcacaaagagaccatcatcagtggagccgggagatgcattccccctcaccctgccttgaggaggcagtggagtcatctgtctgggatcctttctgacccagccctatttgtttgtctctttggcttctttggatttgtatattttagctgttataacactgtaaaacaaacagagtgatttttttgagttgtgtgaatgatgctagctccatagtcaccctgagagtgatgggaacttttgaatttgtggcaagttggagggtagtgtaagtgacctgagattgccaaattggggctagcactggatgtgaggttaggctagtggaaaaatatgcccagaaccagaggagtgtgggctcactgcaggtggttaggctcagatccaaattgtacagatggatagctttggggtaaagaataacatagttgagaagtgcatgtgttagtctgttcatgcactgctataaagaattacctgagactgggtaattatttataaaactcaggtttaattgggtcatggttccacaggctgtacaaaaagtatgatgctggccatcagctcaacttctggggaggccccagaatagttagagtcatggcaaaaagtacaagggaagcaggctcatcttccacggccagagctggagcaagtggtaggagaggtgatacacactttcaaacaagtaggtcttttgagaactccatcaccggacagcacctatgggatggtgctaaattattcatgaaatatccgcctccataatccactcaactgtcaccagcgcagccagccccacctccaacagtggggattacaattccatatgaggtgtgggtggggacacagctccaacctcaatcagtgggcatcctggattgggtctactatagaaggagaaccaggagctgactatgatcttgaaccctacccatgatggccgggcggggtgactcatgcctgtaaccccagcactttgggaggctgaggtgggtggatcgcctgaagtcaggagttagagaccagcctggccaacatggtgaaaacctgtctctactaaaaatacaaaaaattagaccggcgttgtgctggatgcctgtaatcacaccactacgctccagcatgggaaaaaataccaaaacttcgtctcaaaaaaaaaaaaaaaaaaaaaaaaaaaaagactgcccatgaccactgcaccagtgagagggacaccagcatcactgagatgcaagggctggacattcttcataggtcagagctcaaagcaggggacactgatacagagatgggctccatccatagcaccaaagtggtgagaggatgtgggaatggcagaggccagcactttgccatcaatgcaagggggtataaggaggtgacaccagtgccagagtacatcacggggggactgccctacaatatctaggacttacctcttagagcgtgtttcattagcgacaacagatataaatggcagacaggtgtgtccctgcattaacaggaaatagaaatcatcaagaggaacagaaggcagatgtcagcagccccttagaaagtcatcatccttcatacagttaaaatctgagacagttctcacacgagaaggcctaactcaaaaagaggctgggttctcatgaggcaggtttatgcaaaaccaaggaaggtgtacaagtttggaattctccagtttcccttggaaaagacctacagtcatttgcttaggtaactgagcactgaacaaaggtgagtattgttgtcttttagaagctcttggccaagaaggccttgttggcataaaacccatggtttggaaacatcaccatgacccctgttagagtaatggcctaagggtgggggtcaggaaattgatgtattccttgccaacttctgcctctaagtgagtgaactctgtttgtgaacctctctcctctgtggttatgttcctaggctctcatgtataatcaggagtcatagacttagaaacaggaaaaatacttacagtgtttttgtggcctgtgagctatgacttataattttaggaaaaaaacaattgcaaatggaaagcctaagtctatcaatgctcatccaagacaacataatcaataaaaaccaatatcaaatctcaaggcaaattatttcctgtatatagatggcagagatgagcaccaccatcaaaaactcaaggaccagtgctgtgggtccagtcatctgtttcatggaattcaccagtctggtatcttcaaaatccagaaggatgatggcagatggcaggaaagtaatgcaaacgtcatcaggtgtgaccccactgtagcagctgtgatggatgttttctctcaccatagcaataaataacacaacctcggtcacactgtatgcattgttggtctgcaaaatccatgttttgcaaaactcttcaggaaggtggatctgtaatattggcattgacatgagaacaacagcagtatttattcacaatctcaagctctctgtcttcccgtctctctcattagccatccaagtagtcctgaggaaccaagcccatcagaacattctgcaacataatacacagctccattctccattcaaattttgttgttgttgttgttgttgatgagacaacatcttactccatcagccaggctgacgtacagtggggctatctgggctgactgtagtcttgagcttccaggctcaaggcatcctctcacctcagcctcctaagtggcttgaactacagacacacagcgacatgctgggctagtttttgtatattttgtagagacgtgctctcaccatgttattcaggctggactcaaactcctgagcgtaagtgatccaagcaccttggcctcaaagtgctgagattacaagcctgagccactgcacccagcccaatctccattctactgataacaatgtcattaccaggtctgatggacaggaaatggtaaggtttctgaaaacctaaggatcacacagcgagttccaaaggctgaaagtgcatacctgtcgacactgataccaatgacatccaatggtgagaatgacattccttgtagtcctagctctgctcataacaaatctatactgaagtgtaagagtttgatggtcatggggattttccatgtctctgcctttcagcgatgtgccatatctgtgaagtgttcagaaatgcaacagcctgaggcatgctgggcatatcctctaataaaaaggaaaatgccattttatggtcctgtatttctacaagttggaacacatgggcctgtgatccagatgggggaaatgggaatattcccactcattcaccttcatccacgaagcccatttgaaagctttgggcttcccatccttgtagattttagtgttgtgggctgggtgcagtggctttcacctgtactgccaacactttgggaggcctagacaggtgaatccactgaggccaaaagttcgagaccagcctggccaagatggtgaaaccccgtccctactaaaaatacaaaaattagcaaggtattggggccagcacctgtaatcccagctgctcgggaggctgaggctggagaatcgcttgaacccaaaaggcagagactgcagtgacccgatcctgcctttgcactccacctgggcaagcagaacaaaacttctgtcttgaaaaaaaaaacaaaaaacgaacaaaaaagatgttagagttctgggtttagaggtctataccccagaaagagaatggtttcaacaagggacaaagaagttgctttaaacgttgacttgccatttcttttcagtgtgtttgttctcttgcgtcaagagaccaccagaaaagtggtgcaattactctcctgtcaagaatcattgactatcatctgcaagagggtcagatcctggtatataattagggcagaaatacttagtctgagaagggtatgacatccagaggccctattaatgatgtccttttctccatgcctgactctgaccccatgtgctggactgcccctgtgtggatggcctcatggcctgctcggactctgaggtcccaccccaagtggcacctccatggagggctctactcttgtatgggctctgacactcacactgagacactctcccatggacacctcttcacccacttggggtctgaaactgggctactccatccctccctaacctggaacagagagctttcactgctattacacaagtcatagaggctaactcctcatttttccaagctaattattgaaacattagtcctgggttgataagacaagataagttaacttttcataaatttgcttatcaagttttgaataaattcaaataaattcaccttccccacacaccttagttgtcgacatcacacgcgcacccatactcacagggtgagcacgaaggcttcactgtcagtggagaaagtggcaaaacccttctgtgcctcatcctggtctagacctggccctcatcctttcccactcttcccctcactcccttggattcatccacactggcctcctgcctgctgctccacctccctgcgaagctcacccctgcctcagggcctttgcacgtgcagtggcttcaagccatatcctcttcacccagatctcccagatctcctgaatgatcttcttttatcattcaggtctcagcttgcatgtaatcttctcagtgaggattacccaaaccacatagttcattcattcattcaaatattcattcaatggcatattgacaaagcagctacttcatgccaggccttgggccaggtgttatggatatggcaacaaacaaaacaagagttttctgctctcaaatttttacccacttaaaggagatatcatacatcatctgtaaataaatacatcatctgtaaataatgatgtaaataaatacatcatctgtaaatctgtaaataatgatgtaaataaatacatcatctgtaaataaataaagtataataaaagaaaatagtaggtttttttggttggaggtgaccgtgaagtttgcaaataccatcttacaacacattattttattttatttcatttcatttttaattttattattattatactttaagttttagggtacatgtgcacaacgtgcagatttgttacatatgtatacatgtgtgaagttggtgtgctgcacccattaactcgtcatttagcattaggtatatctcctaatgctatccttcccccctcccccaccccacaacagtccccggtgtgtgatgttccccttcctgtgtccatgtgttctcattgttcagttcccccctatgagtgagaacatgcggtatttggttttttgtccttgtgatagtttgctgagaatgatggtttccagcttcatccatgtccctacaaaggacacgaactcatcattttttatggctgcatagtattccatggtgtatatgtgccacattttcttcatccagtctatcattgttggatatttgggttggttccaagtctttgctattgtgaagagtgccgcaataaacatacgtgtgcgtgtgtctttatagcagcatgatttataatcctttgggtatatacccagtaatgggatggctgggtcaaatggtatttctagctctagatcactgaggaatcgccacactgacttccacagtggttgaactagtttacagtcccaccaacagtgtaaaagtgttcctatttctccacatcctctccagcacctgttgtttcctgactttttaatgatcgccattctaactggtgtgagatggtatctcactgtggctttgatttgcatttctctgatggccagtgatgatgagcatttcttcatgtgttttttggctgcataaatgtcttcttttgagaaatgtctgttcatatccttcacccactttttgatggggttgtttgtttttttcttgtaaatttgtttgagttcattgtagattctggatattagccctttgtcagatgagtaggttgtgaaaattttctcccattctgcaggttacctgttcactctgatggtagtttcttttgctgtgcagaagctctttagtttaattagatcccatttgtcaattttggcttttgttgccattgcttttggtgttttagacatgaagtccttgcccgtgcctatgacctgaatggaaatgcctgggttttcttctagggtttttatggtttgaggtctaacatgtaagtctttaatccatcttgaattaatttttgtataaggtgtaaggaagggatccagtttcacctttctacatatggctagcctgttttcccagaaccatttattaaatagggaatcctttccccacttcttgtttttgtcaggtgtgtcaaagatcagatagttgtagatatgtgacattatttctgaggactctgttctgttgcattggtctatatctctgttttggtaccagtaccatgctgttttggttactgtagccttgtagtatagtttgaagtcaggtagcatgatgcctccagctttgctcttttggcttaggattgactttgcaatgcggggtcttttttggttccatgtgaactttaaagtagttttttccaattctgtgaagaaagtcattggtagcttgatggggatggcattgaatctataaattaccttgggcagtatggccattttcacgatattgattcttcctacccatgagcatggaatgttcttccatttgtttgtatcctcttttatttcattgagcagtggttttagttctccttgaagaggtccttcacatcccttgtaagttgggttcctaggtattttattccctttgaagcaattgtgaatgggagttcactcatgatttggctctctgtttgtctgttattggtgtataagaatgcttgtgatttttgtacattgattttgtatcctgagactttgctgaagttgcttatcagcttaaggagattttgggctgagacaatgggttttctagatatacaatcatgtcgtctgcaaacagggacaatttgacttcctcttttcctaattgaataccctttatttccttctcctgcctaattgccctggccagaacttccaacactatgttgaataggagtggtgagagagggcatccctgtcttgtgccagttttcaaagggaatgcttccagtttttgcccattcagtatgatattggctgtgggtttgtcatagatagctcttattattttgagatatgtcccatcaatacctaattattgagagttttcagcatgaagggttgttgaattttgtcaaaggccttttctgcatctattgagataatcatgtggtttttgtctttgggtctgtttatatgctggattacatttattgatttgcatatattgaaccagccttgcatcccagggatgaagcccacttgatcatggtggataagctttttgatgtgctgctggattcggtttgccagtattttactgaggacttttgcatcaatgttcatcaaggatattggtctaaaattctcttttttggttgtgtctctgcctggctttggtatcaggatgatgctggcctcataaaatgagttagggaggattccctctttttctattgattggaatagtttcaggaggaatggtaccagttcctccttgtacctctggtagaattgggctgtgaatccatctggtcctggactgtttttggttggtaagctattgattattgccacaatttcagatcctgttattgctctattcagagattcaacttcttcctggtttagtcttgggaaggtgtatgtgtccaggaatttatccatttcttctagattttctagtttatttgcgtagaggtgtttgtagtattctctgatggtagtttgtatttctgtgggatcagtggtgatatcacctttatcattttttattgcatctatttgattcttctctctttttttctttattagtcttgctaccggtctatcaattttgttgatccttttaaaaaaccagctcctggattcattaattttttgaagggttttttgtgtctctatttccttcagttctgctctgattttagttatttcttgccttctgctagcttttgaatgtgtttgctcttgcttttctagttcttttaattgtgatgttagggtgtcaattttggatctttcctgctttctcttgtgggcatttagtgttataaatttccctctacacactgctttgaatgtgtcccagagattgtggtatgttgtgtcttttttctcgttggtttcaaagaacatctttatttctgccttcattttgttatgtacccagtagtcattcaggagcaggttgttcagtttccatgtagttgagcggttttgagtgagtttcttaatcctgagttctagtttgattgcactgtggtctgagagacagtttgttataatttctgttcttttacatttgctgaggagagctttacttccaagtatgtggtcaattttggaataggtgtggtgtgatgctgaaaaaaatgtatattctgttgatttggggtggagagttctgtagatgtctattaggtccgcttggtgcagagctgagttcaaatcctgggtatccttgttaactttctgtctcattgatctgtctaatgttgacagtggggtgttaaagtctcccattattattgtgtgggagtctaagtctctttgtaggtcactcaggacttgctttatgaatctgggtgctcctgtattgggtgcatatatatttaggatagttagctcttcttgttgaattgatccctttaccattatgtaatggccttttttgtctcttacgatatttgttggtttaaagcctgttttatcagagactaggattgcaacacctgcctttttttgttttccattttcttggtagatcttcctccatccctttattttgagcttatgtgtgtctctgcacgtgagatgggtttcctgaatacagcacactgatgggtcttgactctttatccaatttgccagtctgtgtcttttaattggagcatttagcccatttacatttaaggttaatattgttatgtgtgaatttgatcctgtcgttatgatgttagctggttattttgctcattggttgatgcggtttcttcctagccttgatggtctttacaatttggcatgtttttgcagtggctggtactgactgttcctttccatgtttagcgcttccttcaggagctcttttagggcaggtctggtggtgacaaaatccctcagcatttgcttgtctgtaaaggattttatttctccttcacttatgaagcttagtttggctggatatgaaattctgggttgaaaattcttttctttaagaatgttgaatattggcccccactgtcttctggcttctagagtttctgccaagagatcagccgttagtctgatgggcttccctttgtgggtaacccgacctttctctctggctgcccttaacattttttccttcatttcaactttggtgaatctgacaattatgtgtcttggagttgctcttcttgaggagtatctttgtggcattctctgtatttcctgaatttgaatgttggcctgccttgctaggttgcagaagttctcctgggtaatatcctgaagagtgttttccagcttggttccattctccccatcactttcaggtacactaatcaaacgtagatttaatcttttcacatagttccatatttcttggaggctttgtttgtttctttttactctctttcctctaaacttctcttctcacttcatttcattaatttgatcttcattcacttatatactttcttccacttcatcaaatcggctactgaaggtattgcatgcatcatgtagttctcatgccatggttttcagctctatcaggtcatttaaggtcttctgtacattgttttctctacttagccattcgtctaatcttttttcaaggtttttagcttccttgtgatgggtttgaacatcccctttagctcagagatgtttgttattactgaccttctgaagcctgcttctgtcaacttgtcaaagtcattctccatccagctttgttccattgctggtgaggagctgcgatcctttggaggagaagaggtgctctggtttatagaattttcagcttttctgctctggtttctccccatctttgtggttttatctacctttggtctttgataatggtgacctagagatggggttttggtgtggatgtcctttttgttgatgttgatgctgttcctttctgtttgttagttttccttcgaacagtcaggttcctcagctgcaggtctgttggagtttgccggaggtccactccagaccctgtttgcctgggtatcaccagcggaggctgcagaatagcaaatattgcacaacagcaaatattgctgcctgatccttcctctggaagcttcgtctcaaaggggtgcctggctgtatgaggtgtcagttggcccctactgggaggtgtctcccagttaggctagatgggggttagggacccacttgagaaggcagcctgtccattcacagagctcaaacactatgctaggagagccactgctctcttcagtgctgtcagatggggatgtttaagtctgcagaaatttctgctgccttttattcagctatgccctgcccctacagatggagtctacagaggcaggcaggcctcattgagctgcggtgggctcctcccagttcgagcttccagaccactttgtttacctactgaagcctcagaaatggtgaacacccctcccccacccagtctgccgccttgcagttccatctcagactgctgtgctagcagtgagcgaggctccatgggcgtgggacccactgagccaggcacaggatataatctcctggtgtgccatttgctaagaccattggaaaagcacagtattaaggtgggagtgtcccaattttcccagtacagtctgtcacgggttccctcatctaggaaaggtaaatcccctaaccccttgtgcttcccggtgacgcaatgccccaccctgcttcagctagccctccatgggctgcatccactgtccaaccagcccaatgagatgaacaaggtacctcagttggaaatgcagaaatcacccatcttctgtgtggatcaggctgggagctgcagaccggagttgctcctattcggccatcttggaatggcaatctatgtttgctttttacatttgaaaaaactggtgtcacgtacctaggtattaatcattgtggtatcctcttgccgatttacctctttatcattaactagtgaccctccttgtcttttgttgttacagtctgtgattttagtctattttatctaatatgagaatagctactctggcacttttttggtttccagcttcatgaaatatccttttccatttccctgttttcatttccctttcggtgtctctatagatgaagttgatttctttaaggcaccataagttgggtcttatttctttatccatttgaccatttagagaatttagaacactgtcagtgttattattcataagtaaaaacttaagagtgggtgtagtggtgtacatctgtatttcctgcactttgagagactgaggcgagctgatctcctggggtcaggagtttgagaccggcctggtcaacatgatgaaaccctgtctctactaaaaatacaaaaattagccaagcatgctggcatgtgcctgtaatccaatttacttgggaggctgaggcaggagaagcttgaacctgggagacaaatgttgcagtgagctgagatcacacagagaagtcatctccactctcctcatcagaacctcttgttcacagcatttgtgagcacaaatcaatgatggttattctttcctactaattagggatattttattacacagcaatagcctccagcaaagggaaccatcatacatgattcctacaagttgacagggctggaattatcactgaaaaactaaggtggctatacttgattcccaatgtccaatttttcatgaatagagaaatttatcctttttccccccagccagaaaccaagttttgctcttacgcccaggctggaatcaagtggcacaatctcagctcactgcaacctctgccccccagcttcaagaaattcaccttttgaacaaggagatattaaggatacactatgtgtatgctaccggtggttgcaggagactcagaaaagagagaaacagtcactggcctcgtgcaactgatattctcgggaggagagaaaggcaatcaagaaagaaacatgctgtatttcagacagctgtaagtcctccacaagaaaagaaagcaggtgaggaacataggaaatgtgtcaaccataaggttcccgctaattctataagttggtcagggatatcctccaagaataagcagcatctgagcaatcacctgaagggaggaaggaaggaagactgtgagtggtggcttacacctgtaatcccagcactttgggaggccaaggagggcagattgcctgagctcaggagttcacgaccactcagagcaacctgttgatacccaatctctactaaaaacacacaaaaaaattacccgggtgtggtggcacgcacctgtagtcccagcttccatgcccagctgatttctctctctccatatatatatatatatacacatatattgtttttgcagagatagggtctcactgtgtcacccagtcatcaagcaattctcttatactgttttggaaaagcatgggaattacaggtgtgaaataccctgctggtcctgaaaaatgtgatatttgggattctctgcctggcttgttttacccaaaataatgacctccagttccttccaggttgctgcaaaagacatgattttcactgttttataactgaatagtattcctgtatgtatacataccacattttctttatttattcttctgttgattgacatgtagggtgattccatgtctttgctactgtaaataatgctgcagcaaatatttgtgtgcattttgatctattcctttgagtaggtacccagtactgcaactgcaggactgagtagttgttatattttttgttctttcagaaatctccatagtgtttgccataaaatctgcactaatttacattcccaacaacaatgcataagatttccccttttctccacattctcactaacatttgttatgtttttgtctttttcataatacccattctgactggagtaagatatctcattgtggtggttgttgatatttttgagacggggtctcactctgttgccagactggagtgcagtggtgtgatcgtggcttgctgcaacctccacctcccgggttcaagcaattctcctgcctcagcctcccgagtagctgggactacaggcgcgtgccaacaggcctggctcattttttgtatttttagtaaagacagggtttcaccatgttggccaggatgatcacagtctcttgagctcatcatacacctgcctcagcctcccaaagtgttggaattacagtcatgaggcagcgcacccaacctcaatgtggttttaatgaccatttctctgacgattcatggtgtggagaatttctttgaaataccttttggccatttatatgtgctcttttaaaaactgactcctgtccaggtgcggttgagcatgcctgtaaccccagaacttcgggaggctgaggccaatggatcacttgaggcaaagaggcagaaatcagcctggccaacaaggcaaaaccccatctttactaaaaatacaaaaaatcagccacgggctgtgactcgtgcctgtggtgcaagttactcaggaggttaaggcacaggaattgcttgaacccggtaggcacaggtcacagtgagccaagatcatggcactgcactacagcatgggtaatagagaaagacctgtctcataaaaacaaatgaataaataaataagataaaaaataaaaaagtctctttatgtcctttgccgactttttaatgggattctttggagttttctgttgtagttgagatctttgtttactctcggtattagtcttttgtcaaaggaaaagtttacaaataatttcttccgttctgcagtttgtctgctcactctgttgagaggattatttctttggctgtgcagcagctttttgtttcagtaaagcttttgaatttatataattaaaattttcagtttggtttaaatttgcactggtcgatttttggttttgttgcctgtacttttgaagtcatactcttgaactctttactagacaataaccagaagagttttctctagttttcttctcacatttttattatttcagtacatatatttaagtctataattcatcttcaattgatttttgtagaaatagtgagaaataggagtccaggtttattcttctgcaaatgacaattcaattgttccagcaccaattattgaaaagggtgtgctttcctcaacgtatattcttatcagctttgtcaaagatcagttggctataaatgtgtggctttctttctgggctctctagtctgttacatcaatctgtgtgtctatctgtatactactaccatgctgtattggtgatgatggctttgtaatataatttgaagtcaagaaatgtgatgctcccagctttgtttatttgcttcagaaaggctgagtcaacagctgcagagatgaagctgcccctcctcgcagggctccttcccggaaaaagatcatggctcccactgaccatataaccatggctggaactcctgaaattcccaaagggaggccctacccagtgaggggggatgaatgaaggtcctacttaaggaatctgtctggccacaatcaggcacagcagctgtgctgccttgtgggggaccagaccacctggattccctggagcctgcaggctagaatgtctgagtccatggaaacacagaaatggaggccgccctcacctccccagaaaactgtagtctcaggcagtctccagccgattgccactggttggctgctattccaagccagtgggtcttaacttgagaggtgctgtggaagtggggcccacggaatgaggctgcttggctccctggattcagccccttttctaagggaatgtacagatggaactcccgccttgcccagctttccaagtatataaaactcctgagtctctgtgagtgtctgagcgagtgctctggcaacattcgacacggctctgtgtatctgacccaagacccttatggcatgagctaatgggaggatcttctgatccatgcgtggcaaagatgcatgggagaaacatggtttgtgggtaggggttgtgcattcactactgcttctcttggctgtaggtgaaggtttctttggctctgtgctgatactgggtgcaccatcacccaccccctttgtttcttctcctgggtcaagtcatttgcctaatcagtcccaatgtaggaacctggatacttcagttcaaggtgctgaattcaccgtgcttttcattcaggggaagacagctgcttctcattgggcatcttggcctgcccacttcacgtcactttttgtaaaatccacaccactccaggaatatccattacttaacttcgcctgaaataaacagaaggctcattacacttatcatgggctcacttacttcgcctataatgaaggtgccatggaaatgctagtggatgacgtggtccattttcttagggatgagatagaaaaatggtgtatggctttttaatttaattaaaatttttagtttggtttaaatttacattggtctctttttggttttgttgcctgtacttttgaagtcttactcgtgaactctttactggacaatgaccagaagagttttccctaagtttcttctgatattttgaccatttcagtacatacatttcagtctataattcactttaaattgatttttgtaaacatggtaagaaataggagttcagatttattcttccgcatatgataatgcaactgtcccagtaccaattattgaaaagggtgtgctttccctagtgtatattcttgtcagctttgtcaaagatcagttgcctatgaatgtgtggctttcattttggattctctcgtctgttacatcaatctgtgtgtccacatttatacctgtaccatgctgtattggtgactatggctgtgtaatatattttagagttaggaaatgtgatgctcccagctttgttcatttgcttcagctgaaaaggttgagtccacaattacaaagatggcagccgcccatccccggaggacctccaacccagaaagagatcaggcttcccaccaaccctataaccctggctggagttcctgaaattccaacagggaggaccttcccagtgaggagggatgaatcaaggtcaaatttaaagaaacagtctggccactatcaggcacagcagcagtgctgccttgtgggggacccctcctgctccagaccagctgccctccctggagcccgaaggctagattgtctgagtctacggaaacagagacggtggccgccccaaccacccagaactcggtagtctcaggcacttggcttgctatcttgccactgcttggctggtattccaagcccgtgggacttgagaagtgctgtgatgatggggaccacaggatgaggctgtctggctccctgtgatatggctgtgatgagtggaggaacaccagggctcatgtctcacacagaattggagaaaatgacacaaacacatgtacagtggttttatggcgtgcagtttaataggcaagaacgaaggaagagctccccatactgagacagagggaggggggctccaaagccaaaagaggaaacccggagtgctgtggataccaatgagttatatgaagaaactggagggggcggtgtctgatttgcatagggttcaggcgattggttcgaccaggcatgtcatttatgtggcccacggaaaaactggccctcccacctagcctttgaatatgcacgtgccggacaccctgatttcctacactcatggggatatatgggggtggccatatcgccaggcacaggtggggacaagggccagaagagggcgggaatcgctatgtttgggtggacccagtttctaatggccggcatctgcagatcaaggttaccggagaactctaaaagccggggctttcctgctagacaagactcatttctggagctgctttaaaaagaaacaaaacttcccaaggaccccttttcctccctgtctgcccaaaataatttcttaacaactcgtataacacctgaattcagcccccttactgggggaatgtaccaacggaactcccacctttcctggtttctcaaggctagattgtgtaaacctcctgggtctcggtctgtgtctgagcagctgctctgccaacactccacacagccctgtgtactaggcccaaggccgccgtgactcagcccatgggaggatctcctgatttcttggttgcaaagatccatgggagaaaaatggtttctggggcggggtcacacactcatggcttctcttggctgtgcaagaaggttcctttggctctgttccaatatagcgtggttcatcacccacccctgttttctttgttctcctgagtcaagttgtttgcctagtcagtcccaatgtgagaacctgaatatttcagttcacgtgcttatcgtgaaattcactgagactttaattcagtggaaggcagcctcttctaattggccatcttggcccgccccctccacgtcacctcccataaaatggccacgctctccagggacgatgccattatatatctttacgtgaaaccgacagaacacttattacactttttgtgagctcatttacttcacttataatgaacatggccatggaaatgctagtggagaaagtggtcgattttctgatggatgtgataaaaaaatggtttgccgaccaattaatgacatatgtctcaaaactagtaacgagacccttaatcgctgggttgaagtttctaatcaagaagatgctcatctatgtattcaacaaagcagcttcccttgcttctgaaatgcttccaaacaacatctcatatttcctgaagaagataatgcctggacaagcagcacaagtcattcaggtttactttcagctcataaatccagcaggatattcgcacaattgttgggaaaccttatcagttcatgagtcgtgcatgtttcctttaatttcaggaggaagagggtaatctggaagagtttcctgacctactctgctgctgtgattaaacaaccaccaggaaattttgatgacactgttctcctgagctcctccctttcctcggggaagaaaagcattgaaactacaaaaataaagtgttatttggctggagtgaggtctcatgtctgcttatgcggtggctcgctgctcagaacagggtgagtctctgagttgtacgctgaggaggggaggctgtcaatctagaaaaaacccattgcatgggacacctccatggggtctggggggctgaggatgaggagctggactggatctagggaaggaggaggtttcagagggtgaaattctggcagtaaatcctgggggtgtttgaaaacttcctccctcagaaggagaagactcagggaggaataaggacaaaccatgggtcccttgaggggcatttactaacttaagaggactttatcgggaagcagagtgacaatggcctccttgaggactgaggcccctggataaatgaggcccagatccagatccagtccatgggagatgagaccttcaagggacatatttttgttgggacagaggaaaagtgcagctctgcagctgcagaggaagccttggcagtgtgaaagcgaccttggagggggccctgtgcgttctgaatgcttctgaggtccatcccctgtccccgcctctttttctggattttttgggctccatggtctccgccatcttctgagcgctccacgctgccaccttcagttttctcttctgggctccaaatactccaaaatctttcatatctgtgcccctacccctgtttttagcatgtgttgggactccaggtccctgaaggtttctggcctgaaatccacctccccagcggtgtggattctgctctagagaccccgcacttggcaaggttcccaggcccctgggggacaaccgagtggtatgtgcacttcagggctccacactcggcaaggtctttcaagcccttggggttccctcctcagttttcttcacatgtctgggatgtagtcactctataaatgccgggatgtgatccccaccccagtgattttttttagttccatgagtgttgctatctgaatagtcatcctgagagtgatgggaccttttgaatttgcagcaagttttagattagtgtgagtggcctgagatcgcaaaactggggctagcattggatgtgaggttaggctggtggaaaaatttgcccagaacctgaggagtgtgggctcactgcaggtggttaggatcagcacagaattgcaaggatgtatagctttggggtaaagaataacatggttcagaagtacatgtattagtcttttcatgcattgctataaagaattacctgagactgggtaattaattataaaaactcaggtttaattggctcatggttccacaggctgtacaaaaaggatgatgctggccatcagctcaacttctggggaggcgtcagaaaacttagagtcatggcaaaaagcacaagggaatcaggctcatcctccatggccagagctggagctagtggtaggagaggtgctgcacacttttgaacaatcagatctttttagaactctatcaccagacagcacctagaggatggtgctaaattattcatgaaatatccacccatatgatccactcaattctcaccggcccaaccaggaccacctccaccattggggattacaattacacatgagatgtgggtggggacacagatccaaactcgatcagtgggcatcttggactgggtctactatagaagaagaaccaggagctgactatcatccttaagactgcccatgatggccaggcagggtggctcatgcctgtaatcccagcactttgggaagccaaggtgggtgaatcccctgaggtcaggagtttgagaccagcctcgccaacatggtgaaaccctgcctctactaaaaacacaaaaaattagatgggtgttgtgccagacgcctgtaatcacagctactccagaggctgaggcatgagaattgcttgaacctgggaggcggaggtggcggtgagccccaatcgcactgctacactccagcatgggcaacaataccaaaacatcgtctcaaaaaaaaaaaaaaaaaaaaaaaaggctgcccatgaccactgccccagtgagagggacaccagcatggctaagatcaagtgctggacattcttcatgggtcagacattaaagcaggccacactgttacagagatgggctccattcatagcaacaaagtggtgagaagatgtgggaatggcagaggccagcactttgccatcaatgcaaggtgggcataaggagctggcaccagtgccagagtgcatcaggggaggactgctttgcaatatctagcacttacctcttagagtatgtttcattagggacaacagatataaatggcagacaagtgagtcccttcagtaacaggaaatagaaatcatcaagaggaacagaaacagatgtcagcagccctcatataaagtcatcatccttcatccagttaaaacctgagacagttctcacataagaaggtctaattcaaaaagagactgggttctcatgaggcaggttcatgcaaaaccaagggaagtatacaactttgggattctccagcttcccttggaaaagacctacaatcatttgcttaggtaactgagcactgaacaaaggtgagtattgttatctttcagaagctgttggccatgaaggtcttgctggcataaaacccatggttggaaacatcaccatgacccctgttagagtaatggcctaagggcaagggtcaggaaattgatgtattccttgccaacttctgcgagacgagtgttggtccactcatctctttcacggaattcaccagtctggtatcttcaaaatccagaaggatgatggcagatggcaggaaactaatgcaaacaccatcagttgtacctccactgtagcagcagtaatggatgttatctcttcattgtaatatccagggagggagaagatgacattattctcaatattctaaacaccctgtgtgtacagcctctgtgatattttttgtaatatccgtgtgggagagaattatattactcctaatatctcaggggttgtgccccctctgtgacaatgttcctaacacccaggaggggataggatgatatcacttttagcatcacagggggtgtacaccccactgtaatattgttcataatatccgggggggagagaatgatattactcccaatatcgcaaagactgtacaccaacctgtgatattatttgtaatatccataagaggaagaataatattactcccaatgtcacaggaagtgtacacccttctgtgatattgttcaaaagatccagttagggaggggatgatattactctcaatatcttaaacaccctgtaggtaagccctctgtgatattcctcataatatccagagggagaggatgatattactcccaatattgcatgaagtctacaccccacctgtgatattgttcctaatatccaggatgggagaggatgatattactcccaatgtcgcaggggatgtacaccttccctgtaatattgttcgtaatatctagaaaaggagaggataatattactttcaacatcgcagggggtgtacaccttccttgttatattgttgctaatatccagggaaaaagaagatgacattaccaccactattgcagaaggtgtacacccccccttgatatagttcctaatatccagaaaaggagaggagatattactccaaatattgcaagaggtgtacattcccctgtaatatttttcctaacattcaggaagaaagagagtgatattgcccttaatattgaagggagtgtgccccccccgtgatattgtttctaatatccaagaaatgaaaggatgatattactcccaatatcacaggggctgtacagccccctcccatgatattgttcccaacatcggggggggggtgaaatagtattattcccagtatcacaataggtgtacacacctgtcgtgatattgttcctaatacccatgggggaaaggacgatattattcttaatatctcagagggatgtacaccctccctgtgatattgttcctaatatccggggtgggagaggatgatattacccccaaaatctcaaagggtgtacacccctcttgtgatattgttcctaatatccagggtggagaggataatattattcccaatatccaggaaaggaaacgatgatgttactgtgaatattccagggggtgtcctcccctctgtgatattgttcctaatatccaggttggggagattatgatatttctccaaatatcacaaggggtgtacaccaaccctgtgttattgttcctaatatcgatggggggagaggacgatattactcccaatatcacagggggtgtacaccacctttatgatattgttcctaatatccatgaagaaagaggatgatattactttcaatatcgcaggggatgtacactccccctgtgatattgttagtaatacctaggagaagaaagtgtgatattactcccaatatcgcaggggatgtacacgcttcctgtgatattgttcctaatatttagggggaaaggggatgatattactcccaatatcgaatggtgtgtacacccccccgtgattctttttttttttttttttttttttttgagatggagtcttgctctgccgcccagactggcgtgcaatggcgcaatctcggctcactgcaacatttgcctcccaggttcgcacgattctcctgcctcagccttcggagtagctgggattataggcagctgtcaccataccaggctaatttttgtatttttagtagagttggggtttcaccatgttggtcaggctggtcttgaattcctgacctcaaataatccacccaccttggcctcccaaagtcctgggattacaggcataactttccctgtgatattcttcctaatattcaggaagaaagaggatgatattgctcccaatatcgcagagagtgtgcactcctcctgtgatatggttcttaatattcagaggaggagaggatgatattactttctatattgcagaaggtgtacacctccctcgtgatgtctttcctaatatccagtgggggagaggttattagtctcaaaatcacagaaggtgtaaacccccatttgatattgttcctaatattcaggggtggggagagaaaggtattactcctagtatttcagggcatgaacacccccaccgtgatatcattcctaatatccagaaggggaggcaatgatatttctcctaatatcacaaagggtgtacaccccttctgtgatattgtaaatattctgtgtgtacacccccctgtgttatagtctgtaatatccgggtgggggagagggtgatatttctccccatattgtaggggatgtacacccttctgtgatatggttcgttatatccagggaagaaaaaggtaatattgctgcccatattgtggagagtgtacacccccatgtaatatggttcgtaatatccaggagtggagagggtgatactgctccttacatcgaggaaggtgtacaccttattgttatatgattcgcaatatccaggggaggagagagtgatattgctccccatgtcgcagggggtgtaaaccctccgtgatatgattggtaatatccaggaaaggaaagggtgatatttctccccatatcgcgggggacgtacatcctcctgtgatatggttcgtaatatccaggaggaaagaggaaaatattgctcttcataacccgaggggtgtacaacccctgtgatatggttcgtaatacccagaagtgtacacccctctgtgatatggtttgtaatatccagggggttagagggtgatattgctccccatatcgcagtgggggtacacccccctggattggttcataatattcatggggggagaaatttacatttatcctcatatcagggggggtgtacaccccccgtgatatggttcgtaatatccaggggaagaaagggtgatattgctccttatatcgcggaaggatcaccctcccctgtgatatggttcataatacccagacgggaagagggtgatattgttcttcataaagcgaagggtgtacagccccctgtgatatggttcataatatgcaaaaggggagagggtgatattgctccccatatcacggagggtgtactcccttctttgatatggttcgtaatatccaggggtgtagatggtgatatagctcgccctattggggagggtgttcacccctctgtgatattgttcgtaatgtccagggaaagagaggatgatattactcccaatatcgcagaaggtttacaccactctgtgatattgttcataatatccagggaaggagaagacgatattactcccaatatggcagggggtgtagaactcctgtgatattgtttgtaatatccaggcaaggagaggatattactctcaatatcgcagaaggtttacacccctatgtgatactgttcatgatatccagggaaaaagaggatattactccctatatcacaaagggtgtacacccctttgtgatattttttgtaatatccaggggagagaggataatattactctcaatatcagaaggggtgaaaaccctcctgtgtcattgttcataatatttagggaaggagagagtgatattactccaaatatcacagtgggtgtacacccccctatgatattgttcctaatttccagaaggggagatatgatattattgccaatatcgcagaaggtgtacaccttactctgacattgtttgtaatatccagatggggaaatgatgatattactcctaatatcacagggggtgtacacccccttgttttattgtttgtaatattcaggggaagagacgattatattactcccaatatcgcagggtgtgtacaacactctatgatattgttcataatatccaggggaggagaggaagtgtacacccccccgtgatattgttcgtaatatccagaggtagagaggatgatattactcccaatattgcaggtggtgtacacctttctgtgatattgtcatgatattaagaaggggagaggatgatattactaacaatatcacaaaaactgtacactccctgtgatattgttcataatatccagaagaagggaggatgatattattctgaatctcgcagaagatatacaccaccctgtgatatggttcataatatcctaggggaaagaggatgacataactgtcaatatcgcagggggtgtacaattccctgtgatattgttcacaatattcagagggaaaaaggataatattactttcaatatcgcaggcggtgtacacattactgtgttattgtttataatatccggaatgagagaaaattttctcccaatatcacaggaggtgtacactcccctgtgatattgttcgtaatatccagggaggggagaggatactattactcccaacatctcagggagtgtaggccccccctttgatattgttcctaatattcggaagtggagaagatgatattacttccaaaatcgcagggggtgtacactccctctgtaatattgtttctaatattcatgagtggaaagaaagatattactcccagtattgcaggggacatacaccacactgtgatcttgttcacaatattcgggggggagaggatgatattactcccaatatcaaagtaggtgtacacccccttctgatattgatcgtaatatccagaattaaagatgataacgttactcccaatattgcagggggtgtacatttttgaatactgttcataatattaagagggggaggggatgatatctgtcccaatatcgcaaagtgtgtacacctcctgtgacattgtcccaaatatccagaggaaaaaaggatgttattactcttaatatctcagagagtgtacacctccctgtgatattgtttgtaacatccagaagaaagaggctgatattactcttaatatcgcagggggtgtacacccccgccccgggatattattcgtaatatccagggggaagtggaatgttcagaatgggagaggatgatattacttgcaatatcatagtgggtgtacaccccactgtgatattgtttgtaatatccgggaaaggagaaaatgacattcctccccatatggcaggggctgtacaccacctatcatattgttcaaaatatccagaaggggagaggatatgtctccaagtatcacagggggtgtacaccccgctgtaatattcttcctaatatccagggtgtgagaggataatagtactcccaatatcccagggcatgtacaccccccttgtgatgttgttcctaaaattcatggggagaaagaatattactcccaatatcacagggggtgtacatacactctgtaatattgttgccaatatgcagcaggagagaggatgatattactcccaatatcacaggggctgtacaccccgctgggatattgtttctaatatcaagggggaaaaaggatgatattactcccaatgtcgcagggtgtgtacttcctctttgtgacattgttcctaatatccaggagagaagagggtgacattccttccaaaactgaaaggggtgtacacaccctttgagatattgtctttaatatccagaacgaaacaggatgatataactcctaatactgcaggggggtacaccctctctgtgatactgtttctaatatccaggaggggaaagaaaaatattaatcccaatatcacagggggtgtacattccccctttaatattgttcctaatatccaggaagacacaggatgatactatttccagcagcacagggcatgtacacccctttgtgatattgttcctaatatccaggaaaagagaggatgatattactgtcaatattgcagggcgtatacactggttctgtgatattgtttctaatatccgggggtggagaaaatgatattactcccaatattccagcgggtgtacacccgttctatgatattgttcctaatatctgggggagagagaatgatattattgtcaatatcacaggggatgtacagattccctgtgatattgtttctaatattcacagggggagaagggtataatactcccgatatcgcagggggtgtacactccccctgtgaagttgttcctaatatccagggattgagagaatgatattactcccaatatcacaggcggtgtaaaccccctgtgtgatattgttcctaacatccagaggaaaagatgatgatattattttcaatatcacagggggtgtacgcatccctgtgatattgtttctaatatccaggggaggagaggatgatattattgttaatatcgcagggggtgtaccccaccctgtgatactgttcctaatatccggggtggaagaggataatattgctcccaatatcgcaaagggtgtacaaccttcctgagatattggtcctaatatccagggagggagaggatgatattactttcaatatcacagggagtttacacaacccctgcgatattgttcctaatatccagcggaagaagagttaggataatactattttcaaaattgctgggtctgtaccccctccccgtgatattgtttctaatatccaggaggggagaaagtaatatgactcccaatatcttagaagatgtacaccctccccataatattatttcttacatccagggggtagaggatgattttgctttcaatatcacagagggagtaaacctttccggtgatattgtttttaatatttaaaaagagagaagataaaattactcccaatacaaaggggatgtattgtgtactcccccctctgatattcttttttaatatccagatggagagaggatgatattactttcaatattgcatgggatgtataaatcccctgtgttattgttctgaatatacaggtggggagagtatgatattactccaaatatcgcagggggttctttccccctgtgatattgttcctaacattcagggagggagaggatgatattactcttaatattgcagggggtgtacccacgcctatgatattgttcctaatatccagagggggagaggatgatctaactcagaatatgacaaggggtgtacacacagcctgtgatatggttcctaatatacaggggagaaggggataatatttctcccaatatcgcagggggtgtacaaccccctgtgatactgttcctaatatacagaaggggacagcatgatattgttcctaatatcgcaggaggtgtacaacgccctgtgatattgttcctaatatccagggcgggagaggatgatattaccctcaatatcgcagggggtgtgcactttccctgttatattgttcctatgatccgggtggggggaaatgacattagtcccaatatcgcaggatgtgtgcaccgctcccccgtgatattgttcctaatatcaagggggagagaggaggatattactcccaatatcgcaagggatgtacatcctccatgcgatattgttcgtaatattcaggaggagagaggatgatattactcttaatatcgcagaaagtggacacccaccctgtgatgttcttcataatatccagggaagcagacgattatatgactttcaatatcgctgggagtgtacatcccttttgggatattgtttctaatatccaggaagggagaggattatattactctcagtattgcaggcagtgtacaccttttttgtgatattgttcctaatattcagaaagggaaaggatgatattactcccaatattgcaggtggtgtatatccccctctgatattgttccttatatcaaggaagagaaagaataatattactcccaatatcaaagacagtgtagacccctcctgtgatattgtatttaatatccatggggaaagaggatgatgttactcccaatatcgcagggggtttacacccacactgtgatattattcctaaaatccagtggaggagaaaataatattgctcccaatattgcagggtgtatacaggccctcccccgttatattgctcctaatatccagcggtggagaggatattactttcaatttgtgtagggagtgtatacccccctgtgatatttttctaatatcaaggatgggaaaggatgacattactcccaatatcgcaggaggtgtacacgccctgtgatattgttcctaatatctagggaaggagaggatgatattactttcaatattgcaggagctgtacaccctctgtggtattgttcttaatatttaggttgggagaaaatgatatgagtccaaatatcgcagaaggcatacacacttccaataacattgttcttaatatccgggggagagggtgatattactcccaaaatctctggggggtgtacacccccttctgatatttttcctaatatccagggaaggaaacgatgatattactataaatattccaaggagtgtacaccttcctaatatcctaatattgttcctaatatccaggggtgggagaggattatattactcccgatatcgcagtgggtgtacacccctcctgtgatattgtttctaatatccaagctaggagaaaatgatatcactctcaataccacagggggtgtacaccttccgcatcatattgttcctaatattcagagggaaagaagatgaagttactttcaatatcggaggggttgtacacaacccctgtgatattgctgctagtatccaggaagaaaggggattatgttactccccttatagcagggggtatacacctcccctgtaatattgttcctaatatcaaggctgggatatacgtggggggaaggatgatattactcccaatatcgcaggggttatacaaccttctgtgatattgctcctagtaaccagggcagaagaagatgatattactcctaatatcgcaggaggtgtacactcccccattatgttgttcccaatatgcagaaaaggagaggatgacattattgccagtatcgcagggtgtgtacaccacccctgtaatattgttccaaatatttagggggagagaggatgatattactcccaacatcgcagggggtgtacacacatcccctgtaatatagttcttaaaatctaggggaaaaggggatcttatttctctaaatattgcagagggtgtacactccccggtgatattgttcctaatagccgggagggagataattaaattactttcaatatctcagagagtgtacatcgcccttgcgatattgttcctaatatccagagcaaaagagaatgatattactcccaatatcttaggagtgtacatttaacctgtaatattgttcctaatatccagggggaagagaatagtattactgccaatatcgtaggggttgtacaccttttctgtgatattgttgcaaatatttagtagagggaaagaatattactcgcaatatcacagggaatgtatacttcccctgtgatattgttctgatatccagaaaaagagagggtaatattactcccaatattgcagggggtgtacaccccccttgtgatattgatcctaatataaaggaaggaagaggatattactcctcatatagaaggggttgtccaccccccttgtgatattattcctaatattcagggaagcagaggatgatattattttcaatatcacagagggtgtgcagtccacctgtgatattgttcttaatattcggggggagaggatgttattatgcctgatatcgcagtagaggtacacccctcaagtgatactgttcctaataaccaggggtgaagaggatgatattactcccaatatcgcaggtggtgtacacccccccatgatggtttctaatatacagagggggagaggaaaatattactcccaaaatcgctggaggtctacaccccccttgtgatattgttcctaatatccaggaaaggaaacgatgatattactgtgaatattccagggggtgtacacccgctttgtaatattgttcctcatatccagggtgtggagaggattatattactcccagtatcgcagggggtgcacgacgcccctgtgatattgtttttcatatccaggaggggagattattatcaatatggcaaggggtgaacaccccctgtgatattgtacttaatagttaggttggcagaaaatgatattagtctcgatatcgcagggggtgtgcactccgcctggtgatattgcttttaatatcaagggggagaaaatggcattactcccaatatcgcagggggtgtacaccgctcatgtgatattgttcctaatatccaggtggagagaacataatattactcccaatatcgcacaaggtgtacacccctcctgtgatatggttcctaatatccatgggaggagatgatgatattactcccaatatcacaggggatgtacaccacccttgtgatattgttcctaatatccagggaagaaaacgatgatattattgtgaatattacagggagtgtacacactccctgtgatattgtttttgatatacagggtgggagaggatgatattactcccaatatcacataaggtgtacaccccccgtgatattgttctaaatatttcggtggggagaaaatgatattagtctccatatcacagggggtgtgtgctcctcaggtgatattgtttttaatatcaagagggggaggagattatattactttcattatcacagggggtgtacacccctcctgtgatattgttccttatatccaggcgaggggaaaataatattactctcaatatcgcaggaggtgtacacaccccatgtgatattgttcctaatattaagggggaaagaagataatattactttcaatatcacagggtttgtactcctttcttgtgatatagtttttagtatccagggggaaagagcatgatattactcccattgtagcaaggggtgtacacacctcctgtgatattgttcctaatatccagaagtggtgaggatgatattactcccaatatcgcagggggtatacaccccacctatgatattatttctaatatccatgggaaaagagtatgatattacacccaatgtcgcagagggtgtgtatttttcctgtgatattgtttctaatattcaggcggggagaagatgatattactctcaatatagcagaaattgtacatccccgctgtgatattcttcataataatcagggaaaaagaggatgatattactaccaatattgcaggggggttacacttcccctatggtagtgttcctaatatccaggaagaaagaggatgatattaatcccattatccaggaagtgtacacccaccctgtcatgttgttcctaatatccagcagggaagaggatgatattacaccccccccccgtgatattctccttaatatccaggaggggagaggctgatattactggatatatagcaggggtgttcataccttctgtgatattgttcctaatatccagaaaaggagaggatgatattacttccaatatcgcagaaggtgtacacctccctgtgatattgatcctgacattcagaaggggagaggatgatattactcaaaataccgcagggcatgtgcattcccttgtgatattgttcctaatacccagaagggaacaggataatattactttcaatatcgcagggagtgcacacccccctttggtatggttcttaatatccagaaggaaagagggtgctattactttccatattgcaaggggtgtacaccccactgtggtatggttcataatatccaggcagggagagggtgctattactccccacagtgcggggcatgtacaccctgctgcggtacggttcctaatatccagggggagagaggatgctatgactccctatatcgcggggtgtgtacacccctgtgtggtatgttttgtattctccaggaacggagagggtgttgttacccctcatatcgctggaaatgtacactcccctgtggtatggttcgtaatatccaggggattgagggtactgttacccccatactccccatatcgtggggggagtgcacctccctgtggtatggttcgaaatatccagggtaagagagggtgctattattccccattttgcaggaggcgtacacccccctatggtatggttcgtaatatccggggtgaggggatgctatcaaaagaagagagaaagagaccccccatattgttctatattattttatactcagtacctgttttaagaagaaacaaggaagtgaaaccaaaagcaggcagcccggcgccaggcaccagacccaaaaccagacccgaaaccaggcctgggcctgcctgaccttagcctgatagttaaaattcaacccatgacctagcaaccaatgttatccatagattccagacattgtatggaaggacattgtgaaatttcttgttctgtgctgtttcactctgattaccggtgcctgcagcccctgtcacatacccactagattgctcaatcaatcatggccctttcatgtaagatctttagtgttgtgagcccttaaaaaggacagaaattgtgcactcaacaagctcggattttgagacgctagtctttcgatgcttccagctgattaaaagccacttccttcactacctcggtgtctgtggggttttgtccgcgactcctcctgctacactatgactccccatatcaaggggggtgtacacccccctgtggttcgtaatatccagcaggggaaaaggtgctattactccccatattgcagggagtgtacacccccttgtagtatggatcgtaaaatcaaggggggagggaaggtgtaattatccccatatctcagggggtgtacacccctttgtggtaaagtttgtaatatccagggatattacagggatattatccccaaattaatacttttataatttcttatgcctgcctttactgcaatctctgaacataaattgtgaagatttcatggacatttatcacttccccaatcaatacttttataatttcctatgcctgtctttactttaatctcttaatctcatcatctttgtgagctgaggatgtatgtcgcctcaggaccctgtgatgattgcattaactccacaaattgtttataaaacatgtgtatttgaacaatatgaaatctgggcaccctgaaaaagaacaggataagagcgatgttcagcgaacaagggagataagcataaggtctgactgcctgtggggctgggcagaacagagtcacatttttcttattgcagaaaatgagtaggagaaatatcactgggaagggaacgcattcctaggggaggcctatggacggccgctctgggggtgtatcccttatgtggttgaagataagggatgaaatacaccctggtcccctgcagtgccctcaggcttgctaggattagaaattccagcctggcgaattctagtcagaccagttctctgctcttgaaccccgtttcctgttaagatgtttatcaatgacaatgcgtgcacagcaggacatggaacctcaatagtaattccattttctccctggccttgtgaccttgctaggcccttctgcccttgtgatcttttattgccatttgaagcatgtgatctctgtgacccactccctattcgtatccccctccccttttgaagtccctaataaaaacttgctggttttgcagatcaggtggtcatcacagaacctgccgatatgtgatgtcaccccggaggctcagctgtaaaatttctctttcgtactctttcactttatttctcagaccaggtgacacttaaggaaaatagaaaagaacctactttgaaatattgggggctagttcccccaatagacattgttcctaatatccagaaaaaaagaagatgatattactcccaatatcacaggggttgtgaaccccacctgtgatatggttcctaatatccaggaagggagagaatgatattactctccatattgcagggggtgtgcacatccctgtgatattgttcctaatatccaggggaggagagggtgatattactcccaatattgcaagggttgtaaactccaccctgtaatattgctcctaatatttaggatttagggggggagaggataatattactcccaatatcgcaggggatgtatatgccctctttgatattgttcctaatatccagggggggagaggataatattactttccatatcacaaagagtgttcacccccctgtgatattgttcctaatatccaaaaaggaagaggatgatatcaatcccaatatcacaggaagtgtacaccccccccttttatattgtttctaatatccaggggaaatgagggtgatatttctctcaatatagcagaatgggtacactccccctgggatattattcctaatatccaggggaaaaaaagaggttgatattcttcccagtatagcagggaatgaatacaccctttgtgatattgcttctaatatcaaggggaaaagaggatgatatgactcccaatatcacaggggatgtaaacctgtggcgttgttgctaatatcaaggagggaagagtatgatattactcctaatgtcgccgaaggtgcacactttccctgtgatattgttcctaatatccaaaagggaagagaatgatattacccccagtattgcagggtgtacaccacccctgtgatattgctcctaatacccaggaaaaaagagaatgctattacccccaatatctaaggggacgtataccttccctgtgatattgtttctaatatccaagtggggagaggatggttttactctcaatattgcagggagtgtacactccccctgtgatactgtttctaatactcgggctgggagaaatagtattactcccaatatcgcagtgatattgtttccctgtgatattgtttctaatatctagtgggggagataattatattactaccccatacacaggggagggtgtacattcccctgtgatattgtttgtaatatccagggaaggagaggatgttactcccaatatcacaggggttgtacaccccttttttgatattgttcctaatatctggggggcagagaattatattactgtcaatatcacagagtgtgtacaccccctctgttatattactctttatattcagggcggtagaggatgatattactccctatatcacagggggtgttcacccctcctgtgatattgtttataatatctaaggggaaagaggatgatatcactctcaatatcaaaggaaatgtacacctttcctgtgatattgtttttattatataggggggcagaggatgatattaagaacaataccacaggggatgtacacccacgtattgatattgtccctaatatgtatggggaaagaggacagtgtaactcccgatatcgcagagtgtgtacacccccttgtgatattgtttctgatatacacggggagaaaagataatatttcttccaaaattgcagggggtgtacaaccccctgtgatattgtttttaatatccagtgggggagagaatattactcccaatattgcagggcgtgtacacaacccctgtgatattgttcctaatatccagagtaggggaggatgacattactttcaatatcgcaaggggtgtacattcccctgtgatattgctcctaatatccatgaggggagaggatgatattattcctaatatggcaggggctgtacaccttccctgtgatattgtttctaacatccagtgggggagaaaatgatattactccctatatcacagaaggtgtacactttccctgtgatattgttcctaatatccagaaggggagaggataatattactcccaatatcgcaggaagcttacaactcccctgtgatattgtttctaatatccagggaggtagggatgatattactcccaatatcgcaggggatgtacactcccccgtgacattgtttctaataaccagggggtgagaggatgatattacgcttaataccgaagggggtgtacacacccttgtgatattgtgcctaatagccagggggaagaaaattatattaattttaatatttatggggaaaaaggatgatattactcccaatatcacaggggctgtacaccgaccttttgatattgtttttaatatccagaagagaagaggataatattgctcccaatatcagaaaaggtgtaaaccccttctgtgatattggtcctaatatccagggagggagagaataatattactaccaatatcacagaaggtgcccacccccaaggtgatattgctcctaatatccaaagataatagggtgatgttactcccaatatcacaggaggtgttcacaccccttgtgatattgtttctaacgtacagggaagggagaggatgatattattcccaatatcacaggaggtgtatactcctctgtgatattgattttaatattcggggggaaaggatgatattactccctatatcgcagagggtgtacaccctctgtaatattgatcctaatatccagggcgggataggatgatattactcccaatatcgcagaaagtctacacaacccccagtaatattgtttttactatccagggggaagaggatgacattactcccaatttcacagagtgtgtacactcaccatttgatattgtttctaatatctagggggagagaatatattactcccaatatcacaggaattgtacaccacctctgtgacattcttgtgaatatccggggaaaaagagaataatattactcccaatattgcagagcgtgtacacccctccatgatatcgatactaatatttttttaaagaggatgatattactcccattgtcacaggatgtgtacaccccccttgtgaaattgttcataatattctggggggagagcataatattactccccatatcgaaaaaggtgtccaccctccttataatatggttcctaatatccaggatattacttaatccaggatacttgtaataccctaaatatacaattgcttgaacctccacctcccaggttcaagcaattcttctgcctcagcctcccgagtagctgggactacaggggcacaccaccacacccagctaatttttttttcttgtatttttagtagagatggggttttgccatattggccaggctggtctcaaactcctgaccttgtgatctgcccacctcagcctcccaaagtgctgggattataggcgtgacccaccgtgccaagccaggaagaggatgctctatagatttccccaataagagatggctttgcagggccattccaaaatatgtcaaagaaatacatttggggataaaatactttgatttcctttagggaatgttatctattatgtgatgctataccagagtcaggttggagtcggttatcttattgcaacaaagagtctgttccgtcactgttgggatctctattttttcctcttatttcttgagacagggtctcactctgtcacccagtctggagtgcagtggtgcgatcttcattcactgaaacctctgcctcctgtgttcaggtgattctcgtgcctcagccccttaagtaactaggattacaggtgtgcgccaccacacccagctaatttttgtattttcagtagagatggtattttgccctgttggccaggctggtcttgaactcctggcctcgtgtcatctgcccacctcgacctcccaaagtgctgggactgcaaatgtgagctattgtgcccagccaggatctctgttttaatgttagtgctggtcactttgcatgaactccaaagggaagaaatataatgaggtgtgtctgaccccctgccttctcatcgtgacctgaattagtttttcaggtttgcaggggatacccttggacaagaaggggctctattcggttggttggggggattagaattttactttttgtttacaatatttctcctgaaagagttaggggctcacaaggaatttccgcgtgagcaacttatgaggaaagccatctgggaagatatgtgtccttgtgtcactgggatattctcgtttaccccaatgatacggcaatgacgcagggttgtgaaattacagctatgtgtttggggaaaaaagaaagcaggattgtgtgactacgtttccaaacttcacttgcccttagccatagtgagttgggggcctggagattctgttttctttcacaatgatatagatacaattaaatgtatagaaagcaaaaaaataaaaaggtgagtaatgaggaacctctgattcctgagtggccatgtagttacccatggcacagagccacagttactgaaggtaaagtttgctggggaatttagaaatgaatccagctcttggaggagtcagtttactggatgcctaagaaaatgcaaacaaaataagaaaaaagggtaatattcaatcccatagttattgttacctgtcatagctaaagtaaaattaaaacagagtgctggcttcaatcttgatgctacactaagcttagatttcagtgaatgtgagtctcagccactagctcagagccacctcccaaagaccaaatcatgtagggacaatagaaagtacttctgagaattgtggttaccaagaacctagtaactgttggggaggagcaaaacaaagtacagaaaccagagggtacaatctgagtgagactgctatcagcttctggaggagcctttactaaaatgaatgatgagagtaactggatgatgagagtaactaatggatgatgagagtaagcaatgtctttggttttcttttttttttttttttttttttagcagacgtctcactcttgtcgcccaggctggagtgtaatggcatgatctcgcctcactgcaacctccacctcctgggttcaagcaattctcctgtctcagcctcccgagtagctgggactacaggcactcatcaccacacctggctaatttttgtatttttagtattttctggtgagggtccaggtttccggaaacaactcagagacatatgttaagatgttatctttagttttcacagggaaccaaatatgttacgactccaatttccttggctattgttttaagttaccattaccttctcgttgatcaagttgctcatttacttctcaagcctagctagatgcctggaatttcccttgaaggaagtcaagattttcctttatctccatactggctgatggtgatcgagtaagcccctaagaggggtccctgctccatctcgagatgctgctagattctacagtgcctaataaacagctctcgcctggccgacaaagagctgcttgctctctggatagcaattccaaagtgaacagacaacatcctgtttggaagactgccactctgttagaagaagcatcaggaaaacctttcttttgagctatttataactaacagcaattgaccaagtatacttttgtgagtgaaactgacctttctccctgtaagaattctccaaaatttggaaactatttgtgagtatttttacttatggcaatataattattggcacaagctcaatcagattcggttttctttcgtaacaggaaccattggagatactcattactctttgaaggcttacagtggaatgaattcaaatacgacttatttgaggaattgaagttgactttatggagctgataagaatcttcttggagaaaaaaagactgggtatattttcaatatgctttccttttaaggtccctcacctgtggaaagtaaagaatgtcactttctgacaggctcaggaacctcaagttatgtagggatctcaagaagatgggggaattcacccagttcatacaggtgaaattgctgttgcaaagattatgaatatgagagaagtccagcatggctgacttcatctcgtgtctggcctcaggctggctgcccttgctcactcttgggcataggccaagctagccatgggaggaatttagtttatagtttaactttgaagcacggatgataatagtctctccctaaaatgaaccccttccttgctcagggactgaaactacctttgtatgacaaatgaaagcccacaagattaagattatgagaggggcctgaattctgctaaaatgcaggtgtagctgactgataacaagtcattgtcccacagcttgcctttctataatctcttgcttctcaggagtcacatggccagaggtcctgagatttccagtcctgtgacccccacccagagatggacttagtgcatgaggaccattttccacacccctatgatttcatcctcaaacaatcagcagcaaccattccctagccccctgccttccaaattatccataaaaatcctagcctctgagttattagggagattgattaataatcccagtcctaccccttgggttgctctgatttaattaaaccttctctactgcaataccacggactcagtaaattggttttgtctgtgcaatgggcaagaagaacatgttgcatggttatacaggtactacaagcacagtctgatggcaaattattggttttgcttcctgcccttgatgtttctaaacatctagtccaaaattacttgtgaaaggtccagcaaagccaattttaaaagaggctatatggccaatcactattctttctacacattattgcaaataatcaggccacggctgggcacggtggctcatgcctgcaatcccagcactttgggaggctgaggcaggatcacctgaaatcaggagttcaagaccagcctaggcaacatgataaaaccctgtctctactaaaaatacaaaattagccaggcatggtggcatgcacctgtaatcccagctacttgggagactgagggaggagaatcacttgaacctgggaggcagagattgcagtgagctgagatcacaccactgcactccagcctgggcaatagagtgagactttgtctcaaataataataataataatcagaccaagtataatgaaattaaaatttattttgcaaataaattggtcctactacaatttatccttcatagaaatgtggaaactgaagataaaaaaaattaggtttcagaagaaaactatactacacctgttattagattctagccctaaacattgtttttgaggtttttattatttacctgcaatttggtctaaattctgaattatttcctgactacaagtatccaaggaataaatgggttttctttttctttatgatagttttagttggcttctaatgcaacaacaatttttattgtaatcctgtgtgcattctattcctactattcaaattattaatgttatagatctttcattgtagtacttctgaattaaccaaaatcacagtattctgaagatgattctacaaagcctgctgtttctacaaaggctgctgatgatttctacaaagcctgctgtagtgttgctgtggcctctgcttaaaaaagtagaaaacacattgatgcagcatgttcaccccaacctccctgcctaaaggctcagggaccatcttggaagaggaaggcgcgtgagattgtaagagccgaattagggggatggagtgtggagaataaggacacttcatcttggatgctcacctgccaaattgacttctgatgaaagccagctccagaaatgtgcctacagttactactttcacctaaaccctgcccttagtcaaatccttctcttcttctaagcaatcaacttcaattccttgtataacccacagtataaaagggcttttataccattctatcctattgcatgtaagccttgggtctgggaggtaacagtgtgggattccaccatctcatctccctgccacccaaacatgcctgctcttctttaagcaatattaaatgtttgtacttcagaaatttgatttgtcagcctcttcttcagactctcagcttctttggcctttgggagtaaatttgcataggcctgctcaaaacaggatgttctgggggtttgggggtgttgttttgttttgttttttgttttgtttagagacagggtctcactctgtcacccaggttggagtgcagtggtgcaatcatggcacactgcagcctcaaactcctaggctcaagcaatccccccaccttggcctcccaaagttctgggattacaagcataagccaccatgcccagccctggacttttctttaaagacatttacacagtgtaggaattactgtgggtgcactgctcaggtccccttctccaggatgctcattcctacctcatagatgattttcctgcagagatttgacctcagctgaagggcagtcacctggtccaggtggttgctattcacctccttcctgagaacagccaacagccagggacacgctagcacagagatataagagcgaccaaggtgaggccccttctgtgctgcggtgcatgctccagagcctccctgggatcagacttaagagggtctccagccagatctggtcttcgctgctttcctcgagctccccagcgcactcctgcaatgcatcttttttttttttttttttttttttgagacggagtttcactcttgttgcccaggctggaatgcaatggcgcaatctcagctcaccacaacctctgcctcgcgggttcaagtgattctccttcctcagcctcccaagtacctgggattacaggcatgcaccaccacgcccagctaattttgtatttttagtagaaacgggtttctccatgttggtcaggctggtttcgaactcctgacctcagttgatcctcctgcctcagccttccaaagtgctgggattacaggtgtgagccactgtgcctggcccaatgcacctcttgaatcacctcctcatgctttgcttttagagaacatgatccccaacatgtgattccagcaaagattctagaaagccaaccgtgacaatcacttctgggtttagatgacccccccccaccacaagatggcagtgagcacctcatcacagaggtgctgatggtctgcagcaccgcgccaggccagaacgtgccttttacagaagaaaataacccagtagctgactaggatggtgaggagggctggtgagcactgcggtagtgagagggacactagcatcactgagatgcaagtgatggtcatttttcataggtcaaagctcaaagcaggggacagttacagggcagggcttcatagcaccagtgtgatgaaagtatctgggagtggctaaggccagcactatgccatgggaagcaaggtgggcctgaggaggaggcagcagcgtcagcctgcaacaagtgggggctgccctgcagagacctaagagtcatgttatagagcacagtgtctgtaaggccaagaagtgtggacagccaagtgtgtcaattactagacatactcaagaggagcaggaagggcagggcatggtggctcatgcctgtaatcccagctacttgggagactgaggaaggagaatcgcttgaacccgggaggtgaaaattgcaatgagccgagatttcgccactgcactccagcctgtgtgatgggagcgggactccatctcaaaacaaaaaaagaaaaaggaaaaagaaaaaaagaaaaacctaggtatacttctcaagcaaataaaaataatcaaaaccaatatcatgcccgggcacaaatttcatatatataacagatttaaatatatgagggtgattatcctctcatatctccatttttttttgtttttccatttttttctttactaaaaaaagttaatgccaatgacacacaatttttttttttttttttttttttgagatggagtctcacttcttcgccctggctggagtgcaatggcgtgatctcgactcactgcaaagtctgcctcctgggttcaagcaattctcctgcctcagcctcccaagtagctgggaccacaggagtgagccaccacacccagctaatttttgtatttttaatagagacggggtttcaccatattggccaggctggtctcaaactcctgatctcaaataatctgcccgcctcggcctcccaagattctgggattataggcgttgagccactgcgccccgcctatgtatgattttttttttaattttattttcataagtttttggggaacaggtggtattttgttacatgagtaatttctttagttgtgatttgtgagattttggttcacccatcaactgagaagtatacactgaacccaatttgtggtcttttatccctcacccccttcccaccctttcccccggagtccctgaagtccattgtatcattcttatgcctttgcatcttcatagcttagctcttgaacccttactttctgtttgagggagaagacatatcatctacaagtagatactgtgtaaacattccattgcatgactatcccataacttatttattatttgtgtttggttatttgctgctatgtaacaaccccactcccaactaaatggtgtgacaattccatgattctgtggatcaaaaattctgaaaagtcaaacccaaggagttttgtctctgctccatgatgctaaagcctccgcaggggtgaggcgaatggctcagggtgactgaaaagctcagggttggaacagctggggatgaggcctctatgtataagatgattcttcactcacaggtctgaaactatggtggggacagccagaaggctcggctcagctgggacagtcacctgagccctacacatgacctctccaacatggtgatcctgaagcagttgggtttcttacacagcatcacacttttcttttttttttttttttttgagatgaaatattgctctatcacccaggctggagtgcagtggcacgatctcagctcactgcagcctccgcctaccaggttcaagcgattctcctgctccagcctcccaagttgctgggattgcaggcgcctgccaccaagcccagctaatttttgtatttttagtagagacggggtttcaccttgttggccaggctagtcttgacctcttgacctcaggcgatccgcctgcctcggcctcccaaagtgctgggattacaggcatgagccaccgcgcccggccaaagctcacacttcttatgattcagccttagatgtcacatcagttcattttccccacacttattagtgttagaagtcacaagcccacccatactcaggggactggcacacagaccccactctcaatggaaggggtgggacaccaccattcctgctgatgggcatttgggtaacttcctgtttgaagctattaagattgggctgctgtggccgggcgcagtggctcacgcctctaatcccagcactttgggaggccgaggcgggcggatcacgaagtcaggagatcgagaccatcctggctaacacggtgaaaccccgtctttactaaaaataccaaaaaaaaaaaaaattagctgggcatggtagcgggcgcctgtagtcccagctactcgggaggctgaggcaggagaacggcgtgaacccgggaggcggagcttgcagtgagccgagattgtgccactgcactccagcctaggcgacagagcaagactccgtctccaaaaaaaaaaaaaaagattgggctgctgtgactattctagtaggtgtctttggtgagcgcctacacgtgtttctctttttctctttagtatatgcccaggaggggaactgctggctcccagataccgtatgttcagggtcacacacacttccacagggttttccaaagcccttgtaccagcacgcactcccagcacctgtgtgactgctccagctgtcccacagtctcatcagttctattgctgatattttcattttagcttaagttatatttaataggaaaattaccgttgcctctgccccccgttcctgcctgtaggagtttctcgtagctgttgctacaggtggccacaaatctgtcacttaaacccacacaaattgatgtccttatggctttggagtcagaagtgtcaactgaaggtactagcagggctgtactgacctggtggcctcagggagcatctgtgctgcttctccaccttctagaggctgctgcatccctcgctccagccccttcctgacaccactcaccctcctacttctgttatcacatcctcaccttctctgtgttcagggctccctctgtctctctcttgcaagcacacttgggattccattgagggccacccacataacccaggagaatttctccacctcaatatccttaacaactgcagagcccttttgccataaaagttaccattcacgggttccagggattgtgacatgggtagctttaggagtgattattcctgcctgtctcccgctcaccagaacttggactttctctctcaacaggagccccctgtgtgggaatagcctgtctcaacgacgccctctataaggacctgcttcctcaaaggacctcatagtcgggtcctgcccctcagtgtccagtctgccttggctggaggggctgcaggggtgtgttggcgccacctggtggagacagggcatcacagcaggtgggagcccagtagaagcacaaccaaaacatgggtaatgtttaaaattttctggctaagcgctgtggctcacgcctgtaattccagcactttgggaggccgaggtgggtggatcacatgaggacgggagtttgagaccagcctggccaacatggtgaaacatcccctctactaaaaaatacagaaaaattagctggacatgtggcgcgctcctgtaatcccagctactcgagaggctgagacacgagaatcgcttcaaccccggaggggttgccgagatcgcgccactgcactccaggctgggcgatagagcgagactctgtctcaaaaaaaaaaaaagaagaggggaggcgaggggaggggaggggaaaagggggaatttgtttggagctgagacatccatcttctcctgacctcagatatttgcactcctggttatgaagccttcacacttggactgaatacaccaccagctttcccgatttccagcgtgcaaatggcagatcgtgagacttctcagcttccataattacatgagccaatttatatatataaattgggtcctccagaaaaacagaataaattatatatataattatacgcataacttaattaaattatacgtataacttagctatatatataatttattctgtttttctgaagaaccctactgacacaaatgttgagcatcttttcatgtgcttattggcttaataacttgtacatcttctttggggaaatgtctattcaagttctttgcccattttgtaactgaactattaatatttgtctttacattgttgagttgtaaaagttccttatatattctagatactagagccttatcagatatatttctgcaactattttctcctaatatataggttgtgtttttattttctttttctttttttttttattgagacagtctcactctgtcacccaggctggagtgcagtggcatgatcttggctcactgcagactcgacctgccaggctcaagcaattctcccacttcagcctcctgagtagctgaggttataggcacttgccatcgcacccagctaatttttgtattttttagtagagccgaggtttcgccatgttgcctaggttggtcttgaactccctgcctcaaagcgatctgtcagcctcagtctccctaagtgctggaagtacaggtgtgagccacagtgcccggccatctattttcaatagtgttttttgatgtacacaggtttggaattttgataatgttcaattcatccatttttttttttttttttttggttctttctactggaccaccactcttgagccctctaatccaacctccacgcggcagccagagggagctctctaaatgtaattactctttccctgctccacctgctcaaaacagtgtcacatttgtgatttaaaacagtatttctcaaacctaatttgcaaacaaagcaggtggaactcttcttgtatgcacagcatctgatttggttggtctggcatgggtctgggagtgagcacacctaccaagcggctgctggggtaacttgcgttttccactgatgatttcagcaatgtttccggtcccacatgctcctccagaaccttgtactcccccatgaaaaggtggagtccatttccccttcctttatttatttttttgagacgaagtttcactcttgttgcccaggctggagcgcaatggcgtgatctcagctcaccgcaacctccgcctcctgggttcaagcaatgcttctacctcagcctcccgagtagctgggattacaggtatgtgccaccacgcccagctaattttgtatttttagtagagacggggtttctccatgtcggccaggctggtctcaaactcccgacctcaggtgatccgcccgcctcagcctcccaaagtgctgggattacaggcgggagccaccgcgcccggctatttccccttcctttgaacctgatcaggacttgacgatggcatcaacatggtgagagtgaccctgcatggcttatgaggctgggttacacaaggcgatgttgcttctgactggctccctctcaggatacatgcccttggaacccatcctctaagctccttgggagcccaacttagcccatgtggagacaagacagggagagaaacagaggcacccccagccctcagccagcatcaaccgccagacaggagagcaaatgcgccaacaatgattccagctgaagcctcagacagcgtggagcagagatgagggatccctgcagattgcagatgcgtgagcaaaatgcatgctgtcactgttttgaaacaacaatgtctgggggctgtttgttatgcagcaatagacagctgtaacaatgctgttactgctgtattccatgaatgactgcactttgagtagcagggggctagatcactagataagccccatggcttctgtgtatgctatttttctacttttatatccttttcattcactttttttttttttttttttgagacagagtctcactctgttgcccaggtgggagtgcagtggtgcaatcttggcggactgcaacctccacttcccgggttcaagcaattattgtgcctcagcctcctgagtagctgcgactatagatgcacccccatgcctggctagtttccgtatttttagtagagacggggttttgccatgttggccaggctgatctcagactcctgacctcaggtgatccacccaccttggcctcccaaagtgctgggattacaggcgtgaaccactgcacccagcctcattcactttctttacttggctcatttttccttgttgcctcaattctcctctaagatcactttcctgacatttcagcctgggcctgttgccttctctgggtcccctccgcctcctgtgcctcccccatctcagccttgatccctcagattatacttcctctgtccccaccctgaccatcttggctgtccctggatagggatgggtatcttctcccactggtctgggagatctggaaggacaggcctggaaaagacttggtcactgctggaaggagctcagttagtgtggtgctgaggacagtacgggtgaggctggccccttcacccaaactcccactctcttccatagatttcacctctgtggcccaggccataggattagggcaactccccttaaacatcgagtccatcctccaagctgtccttttttttttttttttttttttttttgagacagagtctcgctctgttgcccaggctggagtgcagtggcgcgatctcggctcactgcaagctccacctccagggttcactccattctcctgcctcagcctcccgagtagctgggactacaggagcctgccaccacacccggctaattttttgtatttttagttgagacggggtttcaccgtgttagtcaggatggtctcgatctcctgacctcgtgatccgcccgcctcggcctcccaaagtgctgggattacaggcgtgagccatcgcgcccggcctcatgctgttcttgaatagtgagcacctgttacaagtcgccccaccagcctctcacttgtacccccctcatctctttctccccaagagacagaggaccctggcacttgtgaagcatgacccagaccctggggccatggcatccaacatcctcattccccatgacccctactgtctagatgtagctgccaagagacccccagactccccgggcctctgtctagagtgccaagacagagagagaatgccctgccgcttgcatgctttgtggggtgtccttcccccttccctggctgctaggcgtgacttcaacgttctccccaacccccaaacagcagcactgacaccagctgcagacctggctcaggttagctaatgaggaccaggctggggatggagcctgaacccctaaaccccagtcctgtaccccaccctaatcctggggtctccactggacaaaacgaagcagcttggtttttcgttgttattgtttttgagatagagtatctctctgtctcccaggttggagtgcagtggcgtgatctcagctcactgcagcctccgcctcccgggttcaagtgattcttgtgccgcagcctccccagtagctgggattacaggcgcgtgccaccacacccagctaatttttgtatttttagtagagacagggtttcaccatgttggccaggctggtctgaaactcctgacctcaagtgatttcccagcctcggcctcccaaagtggaagcggcttatttttaaggagaaaactcccgtggaaaggaatcagcacctcctctgtcaacatttcacttctctgaaaagactctcacttccaacagaaagtgctttgtaacacaacaatgaggctgggcgaggtggctcatgcctgtaatcccagcactttgggaagctgaggcgagtggatcacgaggtcagaagttcgagaccagcctgaccaatatggtgaaaccccgtctctactaaaaatacaaaaattagttccgtgtggtggcgtgagcctgtaatcccagctactcaggaggctgaggcaggagaatggcttgaacccaggagatggaggttgcaatgagccgagatcacgccactgcactccagcctgggcaacagagtgagactccgtctcaaaaaaaaaaaaaaaagaatgagaacatatggacacagggaggggaacaatacacacaaacaaaatttagaaacaggtgaaaataattttagtaatatttttactaatactgatatgctcaaaatattattatttcaataagtaatctaaaaattattgagatgtcttatgttcttttcatcatactaagcctttaatatttggtgtgtattttacactcacagcacatctcaatttgcagtccccatgtttcaagcactaaataaccatgtgtgtccggtggctaccatactggacagcgttgatctgaaatcgcatctgtatgcatcaccagcatatttgcagagatccccatctcagcagcacacctgaggctcatctgcgaaagcacctgcaacttctctacaacctcccacatcacctccaaacacatcctcatgtcatctgcaaacacacccatagctcacaggccaatgcctaaatatcattgcaggcaccttcagagaaagcacttactaaaggggtatacttgattccacatctgctttgacctgcaaatctcccttctcctttacatacatttgcatctcatttgtatgtcaatctaaatccactggcagagcctcagatcatcatctcaaagtcaggtggatgtggggctgggcaggcctccaggtgttcctcctcctgcttcctctggggctcttgatcctcctcctcttccttgctgctctcctcctcctcctccaatatggtgaccagttcctcccgcagcgcccccatctccagccccaggctgcacagctgtcccagcagctggacatccactcggcgcaggttcccctgccagtaggaaggggacgtcacagggatgccaccccagagagcaaggggtctctccaggacctgggtgagagcaggtcccaactcatgtcctggccacagcgcctgggcagggtcctcactgtgcccatggaccctaactgccttcctgcttctcagagtgtctcttgatctctaactcttctctttgtctctccatttcattgtccctgacttctctctctctgtctcctccctctcttatctatatctgtccctgtttccctttgtctctgtccccatttattttttgtctttccatgcccctgtctctctgtctttatgtgttgccatttctctgcccctgcctttggctctctttctctcgcttgccctctctctgccctccccaactttctcaaattcagtctgtctctccatctctgttcctgctctccgtctctgcttcccacctctgtccctctcttttgggatctccctgtccccacctctgttcccgtccctcactctatgtctgtctctcggtgtctgtacatgcctctcatgtctctgcttctatctctcagattctgtttttcgatctctggccttctctatttttgttcatttccattcattctcatttcctctctttctctttcccttccaaacccctcactcaccagctcctccctgatccacagcagactatcgcaggcacctccagtgtctgcccctgcagtcctgagggtctgaccagggatttccactggggagacctccctcagggcctgggggggtgggcccagccccggaggcaccagtccagcctgattcagctgcctccacagttccatcgtctctgagctatggctgcaaggagcaggaagtagcaaggtccagggtggcctggtcccctggggagctgtgtgcgtggtggagagtaaagggcagagggagtgggatgggggttcctgggaaaggtatcccaaagtccactcttcagagagaatcagctggccttgtgcttttctttttccttctgaagtctaacctcaactctgctcacagggttcaaacatagcctcttgcagaggtctaactccacccttccctgcctgtctcaggcctgacccctcaggggcgctcagtgtctgtagatgcctggcaccctctgtccttccacctgccccccaccaccacttctccagcctctcctcagcctccatttgacctctggcttgcccatagcttggtccttgcttgtcctcttggcacgggtcatcctagggctttcccaccagtgtgcctttgggggcaggaatggctcccaggggcaccaagacagcaatcccttagctggagtgcctgtgtccaggctgctggcctagggccaagcagccaattctgctgaccctggacttgcctatgggtatattatccctgttgagggtgagggcttctgctgtggaaaagtctgggaagcactgcaggcctctctcggccttggacccttccttcagacccaaggtgcatatatatacatatatataatggtagatcacgaggtcaggagatcaagaccatcctggccacatggtgaaaccccgtctctagtaaaacacaaaaaattagccgggcatgctgccgcgtgcctgtagtcccagctactcgggaggctgaggcaggagaatggtgtgaacccaggaggtggaggttgcagtaagccaagatcacgccactgcattccagcctggcgacagagcaagactccatcttaaaataaacaaatgaacaatatatatatatatgtattttgttttttgagacagagtctcgctctgtcatccaggctggactgcagtggtgcaatcttggctcactgcaacctccgcctcccgggttcaagcgattcccctgcctcagcctcctgaacagctggggttacaggtgcacgccaccacacctggcgaatttttgtatgtttagtggagacggggtttcaccatgttagccaggctggtctcaaacccctgacctcaggtgatctgcccacctcggcctcccaaagtgctgggattacaggcgtgagccaacgcgcccagccccaagtcccttttaccatagaaagtaacatagtcacagtgcccagggattcacaggtatggggagagggttcgttattcagctgccacacccaccttcctaaacctgctgcccttccagtttcctcacgtgcacagccacgcccgtctgcttttagtttctcaatctgttggcttaaccttcaaaacaggcccaggatttgagcacttctcaccattccctctgccccatccccattcatctcttgcctagactgctacagcagcctcttttactggtcccctgcatccacccttgccctctaaggcaagggtccccagtccctgggccaaggaccagtaccagcccctcgcctgctaggaactgggccgcacagcaagagatgagcagcgggtaagtgagcattaccgcctgagctccgcctcctgtcacatcagcagtggcattagattctcataggaggcaaaccctattgtgaactgtgcgtgcgggggatctaggttgcctgctccttatgagaatctaatgcctgatgatctcaggtggaacagtttcatcccaaaaccatccccaccccacccccgacccccagtctatggaaaaattgtcctccacgaaaccagtccctggtaacaaaacggttagggaccgctgctctaaggtacattctccacctggcagaaataatctttacaaaatgtaaatccgattttgacactcccttcttcccactgtgaatagaataaaaccctaccaggcctgcaccgtcagcccctgcccacctctcaacccagtctcctatctctgtctgcaagctggttcccacctcaaggcctctctgctctagaggctacctctccctgcagcgcttttcccctagatctttgaatggctctttccttatcattcacttctacttcaatgtcacctcttcagagaggcctttgctgatggccctacacccagtcacttttttttatctgcttctcatcaaaattgccttgctgattcctttgtttcttattcatcctctcccacatccatcctctcccagcccagaatgttgacttcctgagagagggactgggtctgtcctgctcaccatggtaacctcggcatctagaacagtgcctgccatcacgtggtaggtgctcagtaaatattcttggaactaatgaatgaataattctatccacaagacttcacaatggctcttcatgctgcgatctagctttcaactccaaactggtcttgagatctcacctcagtctctaaccttgacatctaacctcttcacccactctcttacctgaccctaatttttaaaaatgacgtggtcagcttttcagccccctcattccctgtttttaggaggtagtgagtggaagctggaagaataagaaagcttggggagactgcaattgcagtcaggaaagaaaggtactctgccgggaagaacaccccatcttctcctagggaaagattgtggagtcctggggtttgttttgtttttcaattttttgttttaagagacagcgtctcgctctgtcacccaggctggagtgcagtggcgcaatcacagctcactgcaacttcgacctccccggctcaagtgatccccccgcctcagcctcgtgagtagctgggaccacaggcgtgcaccaccacgcccggctaacattttattttttgtggatataaggttgccctatttctttgtggagataaaggctcccctatgttgcccaggctggtctcgaactcctggcttcaagcgatgctttcgcctcggcctccacaaagtgctgggttcacaggtgcgtgagcccgacctgtgtctcgttttgaagctcagggagagggcgctgtgagcaatccctaaaccctttaagagtaaaaagtgcgtgcacctttaagaggacggttagaaaacgcggggcgtggccacaggagaataagttcgcgctgaaccaggagcgtgggataagaccggccccttccggttacgaaaccttagcaagatggcggctccctgggcgtccctgcgcctggtcgcccccatgtggaatgggcgtatcaggggcatccatcgcctgggtgcggcagtggccccagagggcaatcagaagaagaaaaggacaatactccagttcctgaccaactatttctacgatgtggaggctctgagggattacttgctccaaagggagatgtacaaggtgcatgagaaaaatcggtttcgagacaaggagtggatcaggccagataagtatggccatttctctcaggagttctggaatttctgtgaagtgcctgtcgaagctgtggatgccggtgactgtgacatcaactacgagggcctggataacctcctccgcctgaaggagctccagtccttgtcgctgcagcgctgctgccacgtggacgactggtgtctcagccgcctctacccactggccgactcgttgcaggagctctcgctggccggttgcccccgcatctccgaacggggcctcgcctgcctccaccacctccagaacctccgcaggctggacatctcggacctccctgccgtgtccaaccctggcctcactcagatattggtggaggagatgctgcccaattgcgaggttgtgggagtcgactgggctgagggcctgaagtcagggccggaggagcagcctcgggacacagccagccctgtccctgcctagcctttagccctgtccccactcacgtggcttctcagcgggctgcatggaatgtctggtagctcaccacacttctggcttccatttgtcttcactcaacgtcagggtgggggagtggtgctggccaatcacaggagagagcgtgagttcccagtatttattcctggctgcccttggctaaaggtcacagctcctgtcaccctgtcaggcagccctttccatgcccctgttcaggcctggggaggtaaaggctcaggctgttagtagccgcagagagccacactcaccttgtcaggagactcttctcaaactgtccttatgtgagtgcactgccatttcttgcagggaccctgactgacacaggggctactactgacactttacagggatagtccccactacccacatgcatgcacccataa

SEQ ID NO: 735331 - DNA, 188304 bp, Homo sapiens
ctccaaggctgagggatgaggagacctgctgaggacccagggccttatctttccatcccactccataggtcccagtattgactgatgctgtcttcacctcctagcctcacttttaaccttctggcacccgcccaccactgtccagttcactattgaagccctgccgtccagtgctgcagagggaaaggatgttcttctactggcctgcaatatttcagaaactattcaagcctattattggcacaaggggaaaacggcagaagggagccctctcattgctggttatataacagacattcaagcaaatatcccaggggccgcatacagtggtcgagagacagtataccccaatggatccctgctgttccaaaacatcaccctggaggacgcaggatcctacaccctacgaaccataaatgccagttacgactctgaccaagcaactggccagctccacgtacaccgtgagtgattcccccatacctctgggtgctggcggtcagttctgcttcacacacatgagattgtcaggcctgggctgtgcctgcatccccctctgcattttgtcccgtgttgagatttgggcatttagtgcaggacacacacatggtaggtaaacttcaacagatcagaattcctttcctgcatccaggccctgcagacactgatggcgggggcgggggggcctcagcagggggaggtcagtctcagccaagcaccccatgccctccccatgaacctgaccctgagaaagaccctggagaactgggtcagggcctggcctgagggcgtcctgggaacctcacaaaagcccagcctcaggactcctgactccgtgtgaccccgggaagcctgtgtcagggctggggtgtggtctcctgggcagggcttactgggagcaaggatttaccagatgtctgcgggctgtggttcctgaagcttctcatcagtgagggctcagctcccagagtctcatctagacaaggacagagcctaccactttccctgggactcagcctggagagggcagggggacaggattactagggcattggccccctgaatgaggagcttaagagatgcccttgggcagtcagtggcccaggggtaggaacagaggggagaaaatgttcctggcagcttcttgtccaccggggatcatgcccaggggtgctctcccatggaggcaaataacagatgctgttgatgtgaacacctcctctgtgccaagcttcatgtcagatcctgtgaataatttaaagttcattcacagacaaagtggcaagcctcagaccattttccatttacatattgtatggaggggaaactgaggcacagagagatacagacaccggccacggtgggcagatcgcagctggcagagtcacatgagggctgtctgcagctgctgccacgtcctctccttcatccctggtgccttactaggtgtctgtggaccttagaacagccactggttcggatgttttcttcttaggtgtctacagctcggagggggagattctggtctggagagttatgagtaaatacagaattaatcagttttttcttaactaaatcacctgcctcaacaatcagtcagtgctggggaagttcaggcctcctcgctcaggtccacaccccgcatctctggacatgaaatggcttcgtgtgttttctgatgtgtgggtatcattccaacaggaggataaaggggaggactttgctttctctccccattcacaccctgcaccagccagggcccagtgtgagacacatactccgtagttctctcatgaaggagggagggaatgaatgaaggaatgatctataacctcttcagagacagagacctggatacaagatcctaggaggttctgggcccaacgtgagacacacactctgtagttctcttatgaaggagggagggattgaatgtaggaatgatctataacctcttcagagacagagatgtggatacaagatcctaggaggttctggccacacctgttttctgtccctctagagcctaagacccatgtctcattcatctggcccgtttctcctaaatctgcccctgggagctgagtctcatctgaccctggggctgcagggctgtgggaaggttttcaggggagggatcaggcttgcgggtagtcccacacgtttgccttacaccctggagctctacctggttctcactatgaatatcccataataatcccccctatcctttctggggagtagaaaaaaagtaaatatttaaaaatatgccagagcatctgttcttcttagcaagttcagatagttattagttagcaggaataaatcgttattttaccagagcctcacctgctgggggtttatgggagcctaactgactgaggggggtgggaaatatccaactccagccccctctagccatcatgtcccacctaaaggagagaaaaaactgagaggcacttgtgacattcacagcccagggcacagactctatccaggaccacagaacccctccctccccccactcaccaccgcatcactgaacgcctgctcacccaagttcctgttgcccagtacatcatgtcctggctttcaacaaaaactacaagacagactagaggcaaaaaaaaaaaaaaaaaaaatgcagttcgaaagacagaacaagcatcagaaccagatgcagatgtggcagggatgtggcagggatgttgaaattatcagaccaggaatttaaaacaactctggggccaggagcggtggctcatgcctgtaatcccagcatttgggaggccgaggcaggcagatcacctgaggtcaggagttcgataccagcctggccaacatggcaaaaccccgtctctactaaaaatacaaaaaattaggcaggcatggtggtgggtgcctgtaatcctagatactcggaaggctgaggcaggagaattgcttgaacctgtgaagcggaggttgcggtgagcctagattgtgccactgcactccagcctgggcaacagagcgagattccatctctaaaacaaacaaacaaaaaacaatactggctaatatgctaaaggctgcaatggaaagcatagacaatgtgcagaacagacggatgctgtgagcagagagatggacaggctaagaaagaataacaacagctactatatctatctatctatctatctatctatctatctatctatctatctatctatatatatgtatatatatgctagagatcaaactcactgtaacacctggatctcagagtggttgtgaggatgtttattaggagattaaagagattaaagcagagttatacacagggcgagagctcaactgatgctatcaactagtattcttatttttttgatgttgttattggcaataaaatcaggaacaatgcagtaaaaatttggttttatcatgtacgagttctgtgaccttccttgacttactgaggtactgtaagtctcagattctaactctgcagatggcggtgatgcccctctccctcaaggtgatgtgaggatgagatgagctgtaggtaggttggtgcccactgtgcctggcacatggaaggcccctgaaaatagtcaatgaacatcatccccgctcatcagcatggagttgacagtgagggctcgctctctgtgacaatcatggaatggaaaagaagaaacaagaggaagactgggcgcagtggctcatgcctgtaatcccagcactttgggaggccgaggcgggcagatcatctgaggtcaggagttcaagaccagcctggacaacatggcgaaatttcatctctactaaaaatataaaaattagcctggcatggtggcacaaacctgtaatcccagctacttgggaggctgaggcaagagaatcgcttgaacttgggagatggaggttgcagtgagccgagattgcgtcagtgcactccagtctgggtgacagagcaagactccatccaaaaaaaaaagaaaaagaaaaaagcaacagagggaagaggtgtgacatgagaggaagaagggatttaaaggtacaggagcagggcgaggtgcaagcacctgtgggagaatgtaggagttggtacatcccagtgtgtcaagtctgagacacagaaaatggtgcaaccgtggagagcaagggagtcagctatgaggacagcccaacagaccacactcaggctctggagcatttccttcctccctgactatgcccctgccctgcaatgccccttatggtttcccttggaacaaacttgggccttgtcccctttgccttcccctttctgcagaaaacaacgtcccaggccttcctgtgggggccgtcgctggcatcgtgactggggtcctggttggggtggctctggtggccgccctggtgtgttttctgcttctctccaggactggaaggtaccgcagcttttccccagcctcctcccacccctaggctgaccccagtcagggaggagggagaccccgccctgtattcagggccaggctttccgcatcctcccaaggaatccttccctctcattccatggctcctcccttgccagctgctgatcctaggctgcctcttcctttatgaatgtggcacagttaaggttgcacccctgagtgctgtcctagttccctaacacagcaaagccacagctgcctggagggaggaagggagggagggagggagggagataagacgggagtgctcagaacctggtaccttctgctgttcattgaatttacccacccagtgaggagggatttgcaggcttgagatccatggtgggggtcctgggcatggtcacgcagtggggagtggcaaagcctggacaggctgggtagggtcagcaccccatcgtgattgatgtccctgaggtgtgagatgggagaacctggacctcaggacctgctgtcctttatgtctcttgccaaggggtggagagagagaggacaaggccattgccccatttcagcatctccaggcctgaaaggagggtctggccatggcagggatactgagttctgggagaatatgatacatgctccttgcctccccatgcccccagctcccccagtgtcctgcacacacagccggccctgctttccctctggggccttgacccttcctctcaggcaaacgcaggtggtctgattccctccctgagtcctcagtccctttcctgggtccctgggtcaatgttctcctcacccggcatctgcctgggggggtccttcctctctggccaggacagacgtgactgcttaaggcctatcctcagctccccgtcctcggccgctcctaccacgaaactgatggagacaggaggccttcactccagtccttgaaaatggagtcccttccttgtcctttattctgcccctaaacctgtgatttctccctgcaccctcatgaataatcctgacctttcctagggccagcatccagcgtgacctcagggagcagccgcccccagcctccacccctggtgagtgtcccttcagcccaggtgtgggagcccctaggcctgccctacggtgtccactcctgccagtcaccccctgggggcctctgaccctttctttggggctgcaaggaggatgtcaggaaacatgacacaggggaccccgactgtcttgttcagactgatctgtgggctctgggtcgtgggtcacctcctcgacctcagctgctcaggtctcccctgggaagaggctccctctccctgattctctgggagctgaggacccctacactctcctgcaggaggggcccaggctctcctcccaccctgctgctcactcctgtctctgtccccaggccatggtccctctcacagatccaccttctcggtaagcctgttccctccccagcccttttctactggggtcccaacagtgcaggctcagggcagggggaccatcaaccccacagcacagcactgacccacctttccccagaacagtcaggtcaaagtgagtgcctccagccaggatccgggcctctctacagggccaggaccacccacgccatgtgctgacccctccccgggaccctctacacctgaggagaaccctggagtccagcaggtgcagaatggacactgggaccatcagtcagaggcccacattaacaagggtgcggggtgggcccagccaggacaggggtcagggtgttgtgtccacactgggaggctgagctcaggggcagagctggtcaatcctgaggggaaatgagtggaagtggaggcagggaagtaagtcctggccgatcagagacaggaaccttccaggctgggcttccgtgaccctccctccctgtcccctgacatctcctctctcccctgcccaggcccctctacccagccccagaacagccactcccatctatgaggtgagtgtgggccatggatgttctggtcccgcaggctccaggggacccaggatctgcccccaccagcacctggctgagctcagattcaggaaaatgcagtgaaaatgagaacaggtggtggtgagcagaggagggaggggcctgggaacagggaccccctgagcacagccaggttcagccccagagaagccctgggtgggcccagagcctgggagatgccagacactgttctgagaaggctacaggggttgaggcctcttctctgtttttacaggaattgctatactctgatgcaaacatttactgccagatcgaccacaaagcagatgtggtctcttaggttcctctgggagctgctcttgtgggttgatggagcgtccccaaagctcccagccctggggacggggaaggacatggagcctgagccagagaaccagctctgagtcctgaggagacacaggcctggggacagggagggatgggagtccctgctgaatatctggagaccctgacaggttgccctgggctctgggtgggccgggacaaaggcctctcatcaccacaggaagcgggggcttgcaaggaaagtgaatgggcctgtggcccacccggggtcaccaggaaaggatctgaataaagaggacccttcctctcattggctctttttctgctcacgggaacttagcagaaactcacctgaaactccgtgtccattctctcccgggtcacacagggaaaatatctccaccttgtctcaaccacagtctctcttccctgggaggcagaaataggggttgggagtcaggctggggtgggccctacacaggaaagggcaagattcacatgagccctgcccagccagccgagcgctcagctgtcctcacactaccccagggaccaaggccatgcacagccccagcctgggtccctctgtgaatgcatgtggggtctcaggagcacagaagatggggccatctgatgtccacaaaaggtgagcaatgcgggagcaaccatgggtggtataggttgcggctgtggcccctacgcagcctccagtgtcctgacccctgctgccctcttcacccaggccctggaggcccagtctatcactgtcctccacaaatgaacttacctgtccccaaatccaggatcctgtgtgcttatacctggccactaggttctcctctgtcccagtggctactgctcaggacatctttatccctggtggggcacagagaggggctgtcagagcaaccaagattaatacagacgcataattcagtccttgagcactacccaggactctggcccctcattgctcatcagttcccactttaccccctggcatggatctcactgagcaagccaactctttacacaggagcatccaggtcagaggtgcaggactcccccatctaaagctcatgcaggctcccatggcgatgggacaacctgtctgctcctctccctggcccacagccctatctcgcctgcagctcctccacacacctgggacagcagttctcagcccttccctgagggcccctggaagggtgatgatctcatataggttcacttgaaccaggtgccaccttcccacaagtgagctggtgcctgcactaaagcacagagccacagttcccaagagtgttctgccactgccacaggtcccaagagtgttctgccactgccacaggttgttcgtcctgagatgagaggtaagaaaacaacccgcaatgggttgttttatatcgggatttgcatcaggatttagctctaaatgacccctgatcccacctgcacacagcgtcagatgagacaaggtgaggcctctttagttttctgttgaggctgtgacaaattaccacaagcttagtgacatagaaacctgaaccaaagtgcccacatggctgtgttctttctagaggctccagggaagagtgcatttcctctccttttccacctcctagaggcctcctgcaaccttggctgtgtcctctttctccatcttcaaagccagcagcacagcatcttgaaactattctgtgccctgcttccatccccacatctccacctcctcccacctccctctctcacttaaaaggaaggagccttgtggttattttggacgcacctgggataaaccacaacaacctccccatctcatgatccttcctttaatctgtaaagtgtcctttaccacgtgacatgtccacagatctggggatgaggatgtacacatctttgagaggcccttgttctgtccatcactcctctcaaggccatcttctcatcatcgttcactacaaactacacatgggcacctggatgggttcatcatgactgtggcgtcagttcctgcattaacatccccagcaccctccagatcctgagagagggagacggagggctctccatgcccctagtacctctccaccttcttcttggtgacatgcttagttgctaagaataacagaaagcggaggtgactgaaagatcacaactcaccggcccttcaatagttcgtggacatcagcaccacggacagtgactcagtgaggctaatttccaggtggcagcagggagcatgcagataggagggaactgcaggaaaagctgcccattctattctatatgagaaagagtgtaagaaagaggaagctattacagggataatgctattcttctctaatccataaattgcgaaacctttgcatgtctggatatcatggtttttagcacatctgctgccactccctgcagggctgattgctgcatccaggatgtggtctcttggggggctcacagcctgctttggcctcatggtgagtctccctgcccctgacactcaggccactgtctctgcctacaacatggtgggaaccttccatgattaacgtctgattctctgtgcctgacctttgaagcacatccatcactcagcctggagcatccgctgagctcagcatcctgctcctccatccccagctgagcccttgaggagatgcttgagaggatctcctgggctcctctgtgagctcctccaggctgagccttgtgcttggtgtcagaggcctttgccatctgcttgttctttccataggcaaataatcctcctcagggacaagtggggcctgaagatctgtctgaatatctatctatctatctatctatctatctatctatctatctatctatcatctatctatatgtatgtatatatgagaatgctttattaggcaaaactgcatactatgaacatgctttaaaatgcaacaggatgagatgtgaagacataaagaacaagtgtgtagtgacacatggctatcagaacacactgaagaatccacaccgcggccgagagcagtggctcacgcctgtagtcccagcacttttggaggctgaggcaggcagatcacttgaggacaggtgttcgagaccagcctgaccaacatggtgaaaccccatctctactaaaaatacaaaaaatttagccgggcctggtggctcatgcctgtagtcctggctgttcgggaggctgaggcaggagaattgcctgaacctgggagacacaagttgcagtgagctgagatcgcaccactgcactccagcctgggagatagagtgaggctccatctaaaaacaaaacaaaacaaaaagaatccacactgcttccccgcttcactttacccagaaaaggaatgttctaggccacttcctcttcagcacacatccccagggaactaaaataggttcacagtcacccccatcttcctcattcccatcacctcttacccacagaggcatctctggtcctacagatccagccctgccttcaagaggcacaggtccaacccatccagtgtccctgctagtcacacacagcactcagggtacaatggagggcttctgtgctttggatgggaacaaaccccacctcacattcccacacctgagaagccaccagggtcctctctgtcctgtcctcacactcaatgtctgtcctgggtcacccttgtcatctctcctggaaataggcatggctcctgacaggtaggattgaggctttgtcttttcaggagtccctcccactctgagcacatgaaactgctcagctccatgcaaccctctctcaccaggggccttgttctctgggtccctgaatacctgggtccatgccatgtacattttaagaaaaatgacagtgactctcaccctgacatcctcacccaaggcacgtgtctgacaagaatcaccaggtgagatacctgtggctccacacacctgaggcttcactgcgcaggggtgtcctcatccctctcctcccacccctagggacagtaagcaccacaggctgccttggaccaccagctccccctcccagacacagcctcagatctatactgacatgctacatggagaggctctgatgaacagcaggtattaggaaatcccaccgaaccaggtgccacttgcggccccactcctcctcatatctgtgactgggacagacacacataacacacctctgttcaccgcccagcccccaaggtcaatcacagtctgcttctcccctagatccactgctccccatgtcttccgtcctcagctgcatcctgggtggcctccttgctgttcttgtaccccagaggcaggttccaacctttgtgatgttgcctgcaatgcccaaactttcccttccccttccccttcccttttcccctcccccttcccctccccttcccctccccacccctatcccttcgtcttcccttgtcttcccttcccttccctataaagccaaacatacccatccacctaccttgtggtcaaagtcatcagcctcctgctccactcagtgttctctgaccctgcatatggaggtggtggcccctcctagaacacccaccactcactgtcagccttgcgtggtaatcacagattttgcaggggttacctgtgttcaggtgtgtcacctgtggaaccagaactcttggaaggactggcagagggagctgcttaggatatctcagggctcctggcatctggtctaccacagggctattaacaacagcacttagggacaaggtggaggatggacggttaagagggtaaatatggatgatgtgtgggcaaagaataggacacaggaacacatgcagtactcaaataattatgccaagaaaggtgaggacatggagatggacattcccatatacttctgatgggactgcagtttagtccctacagcaacattgacctcatcatgtttaacgcgcacacgctctgaccactatcctacttctgaaggcctccctgtgctgtgagctctgagaaggccaagcttgcctgttctgtctctgctaaagccagagaccagccaatagcccagcacagggtacttcataaatacatgttgaaggaatgagctccaggaacagtactccacatggtagagatgtgtgtatgaggatgttcactgcagaaggtcatgtcaatgtgacaagtgacgagcagcctcaaatccagcaacaggggtgtgggtaaaagatcatagtgtagccatgcaatggaaccaatgaaaaaaccacaattagagcaaatccacatgtattaataaaggaggtgccctccatacatgctgcacctaacagaatgttgccaaataagaatgaaaaatgatgatatttgggctgtaaaaactagaagtcagctaaataagaatgcatcgaaagtatttgtgaatgcttacaattttataatgccttggcatccgttttggatggaagttggactttctcataccagaagcagggctcagtcacctttgaaatagtttccagttctccacctccttccagttcctcagtgtgattgatcagatatctgatttatacaactgcctcctggtgacctcctccctatgggacttccggatacagcccgtatgactgccccactgaccccacaccctgcctgctgcagtgaccacctctaattacctggatctcatgtctgcttgcattaaatccaccaattaaaactccctgaggacaatctgtttgaataatattctgtaccctaataaaggccttgacccatgggttccccctctgtcctccccatactgcccctgacctctgtgtgtgtgtgtgggtgtgggtgtatgtgtgtgtgtgtgtgtgtgtcctccagacagggcctgtatcccccaggacctgtaagtaataaatctttattttcatcttatgtctctcgcaatcattggcaagagctctgcatcttaaagatcgcaaatttaagaaattggtgtagtcggcacaatagagtacctcttctgtttagcacaagatatctcggagctgctgaggcttttaacatcctcgccggtgtggctgcctcactggtgaggccgttctgttcagtgcaattcagttgctccactgtgtgctgctgtgttgctgctgtagagtgctgccatgttgttctccccaaattgttaccgagtaggaacctgtaatgtgctcccaaggtggtctaccccatgagaagggggattctccatctagggcaagggctaggtgtgtttctggaatcctaatagggaaggcatccacagagggtgaactccactcctccttagagtgaggagtgacatttcccatttattttccccatggaggtgccatgtattgactttttctttcactgtcccaaggttgagccaaggtgagctatggagaccagggcaagataccatttctgttagcaaagcaaatgggtgacaacgtgtggagaagctgtggttctcctgatggatatagcagagtgccatttagtaaaatcttgtcaggaggctgcccctggttagaccggcagtgtctgtagtcactaaggtggatgcgaattttaggccctgggccatggataatccctgcagacacagccgtggcttcatgtgatggggcaatcccgggctagtggctcccttgtttctgcatttcttgctgtggttgcacaatcaacacctcaggggttgattgggtcaccttggaaagagaaacagctgcctaggaggctggtgcacatggaggccaccctcaattttattctgctaacaagttgtaagattaaaacaacagggggctttgggtaccatcaggaacttgtcaagtaaacatccaaagacagaaagaagaaaaagaaaaagacattaaccgtctagaaatacaagccattttaaagattttgcttaaaagatgcgcttgggctgggagcggtggctcacacctgtaatcccagcactttgggaggccaaggtgggtggatcgactgaggtcaggagttcaagaccagcctgaccaacatggtgaaacctcgcctctactaaaaatacaaaaaattagcagggcatggtggcaggtgcctgtaatcccagctacttgggtggagaatcgcttgaacccgggaggcagagacggcagtgagccaagatcgcaccactgtactccagtctgggcgacagagtgagacttcatctcaaaaaaaaaaaaaaaaaaaaaaaaaagacgggcttgtttcgtcgttgtggagtcatcccagagagaggctactccctagagtcactgaccacctttcctcctccatcttttcctcttatcattctagagacagaaaacaagaatctcagctttaggtggctaacctcaccccccaagaaaagaaactaccactttgattgactacaaatccaagaaaaataaaagagaaactttaaaaagtactgagcaaaccacaggtctagcaaacataatgctagccctaggttacttattcatttacaacaaacccctagatataggaggaaaaaataaaaggtaattaaatatatacacatacaatattttaatataaatatataataaatagttaaattatgtatgtataatatgtaactaaatcaaagtaaaatttcatactttgattctattggaaattcaaaattcatttattaacttatatattaaggaatttatgtaaaaaaagatttttaaaagggcaccaatttgcttttgtgtctctacaacataggatctaatttaactttacatttgctaaatacactaattgacaaatattcatggatttaatcaatactggggctcaaattgtagccacacgtgggaatcccataaatttaaacactctgtccctattatcttgagaagaaaactaaatataaaattgaaaaaaacaggtatgtctcaatttacctgtaactttgcctaaatttcccggagtcatatacccattgctgtaaaacattctctattggacataggtgctctgagacaataaataaaatagaagtgtttttggtacttagacattggcttgacaaaatgggatcccatgaaacctcagttaagatagtgaatacggcccaatgtgagttgaaatggggcctttaaggattaaaacttattacatgaaacctagtaagtaatggggtgattatccatactgcttctccatttcatagcccaattttgacagttgtcaaatctggaaaaaacaaacaaacaaacaaaaaaacccctgggaatctgttgcctcacagagacacaaagtagacatcaaaattgtatatctcagttccagttccaaaatggtggcatagaagcaagctggctttactccttcacacagaaaaccaaaaacaaatatacagcaccaaaattattaccagatatattccagaactcaaatatgaaaatgaaacagttttcagagccacagagaagtgaaaaaaactcccgacagatgacaaaagaatcagatttccccatctgtaatgtccctccctgccccattctgcctggtaccaggtgtgtggaaaattttaccccaactcatggtttctacactgggaaatgtaagatcaatgcgggcaaccagtttctgcacaatcctgggttccctgtccctgccttaacccacaagaagcattgtgagtgcccgaagggagaaatttccctgaggacagtcaaagagtggggaggcaggactaccatctccttccctggaaactctgctgtgtaactcagccaagggagacatgaaatcagactggtgtttcagcagctccatgttgtagtaggtttgtttcacaggtatcctgggcatggacatctagccagctttcccacactgccaggatatcccctttgggacctccctcagttaggaagggcacactctgatcatttactagggccaaggtaaaccctaaaggtaacttagagatgaaaaggaggtagtgacctagcagtaaagaactctaagaaaatctatccaataaaaatcaaaacaagccagacaaagactaaaataaataatgaatccttcaatgtaaagacctggacttacatccacaagaaacagtaagcaggtaaccatgatctccccacatggacaaagtgaggaacaagtgactgatcctgatgagatggtgatgtgtgagctctctaatcaagaattcaaaactgcagttttaaggaaactcaatgatcttcaagaaaacatggaaaagcagttcagaaatttatcagagaaatttaacgaagggattgaaataatttaaagaaaacaaacaggaatcttggaattgagaaatatatttgctgaacaggaaaatttattagagtctctcaacagcagaatggatcagaggaaagaatcaacccaaataagactcccccaaggcataaaataatcgaattctcaaaagtcaagggcaaagagaagattttaaaacagaaagagaaaagaagcaaatggcataaagaagctccaattctgtggcaacagattttcagtggaaatcatacagaccaggagggagtgacatgacattctcaaaatgctgaaaaaatattgacatttgagaatactttatccagtgaagttatccttcaatataaaggagagagaaagtttcctagacaaacaaaagctgagataattcacaccatcagactagtcttcctgtaaatactaaagggtaaatactaaatacttcaatgtgaaagtaaaaaaaaaaacactaacatgcaaaacaaccacaacaacaataacaacatttgaaggtataaaatccactggtgaaattaagtacgtagacaaacccagaatactcaaatagtaattgtggaaagtaatccaatcataactctagcatgagtctcaaaatataaatctatcaaaaacaataatacattttaggaggccaaggttggcagattccttgaggtcaagagttcaagaccagcctggtcaaaatggtgaaaccccatctctaccaaaaaatacaaaaatttgcagggtatggtagcacatgcctgtcgtttcagctatttgggaggctgaggcaggagaattgcttgaacccaggaggtggaggttgcagtgagctgagattgcactactgcactccagcctgggtgacagagggagactctgtcttaaaaaaaaatagctacctgtttggagaaaggtaatataaaatatgtaaatagagacaaagtcaaaatttgcaaaggatgaaattaaagagtagagtttttttggggggttttctgtttctattattttatttgtgatctaagataagttgttaccttttcttctcttgaagatactttgttatatctatgtttttggaagtcttatggtaactgcaacgcaaaaaatctatgatagatccactgaaaataaaaaacaatgacttaaaacatactaccagagacaatcaaccacaaggaagacagtaaaaaatgaagaaaggaagaggggagttacaaaacaaccagaaaacaggcaacaaagtggcagtagtaagttcttacttaaaaatattgaacactgaatataaatggactctattctccaattaaaaggcatagagtggctgaatgctgcctatatgctgcctacaagaaaccacttcatgtaaaaagatacaaatagactgaaagtgaagggggtggaaaaagatatttcatgcaagtggaaaccaaaagagagcaggagtagctatactgatatgagataaactacaaatcaaagactataaaaagagacaaagaaagtcactatgtaatgataaagcgctcagttcagcaagaggagatgccaattataaatatctatgcatccaacacttgagctcccaagtctcccaagtatttaaagcaaacaatagtggatctaaaaggagagatagactgaatacaatattaattaggggactttaacaccctgctctcagcaatggccagatctttcagacagaaaatcaacaaggaaacttcaaagttaaactacacactagatcaaataggcctaactggcatttacgggacatttcactaactatctaactgttacagaattcacattattttcatcagcacatagaacattcttcagaacagaccacatcttaagtcccaaaaccagtcagaataaattcaaaaaagtttatatcacatcaagcatttgttctgaccacaatggaataaaactacaataaatgaataactttctggacacatacaacctaccaagatggaagcatgaaaaggcagaaaaacccaacaaaccaacatgaaactgtaacaaaaggaaaacccaggaccgaatgacttcactgctgaattctaccaaacatttaataagaactaaaaccaattctactcaaaatgctttaaaaaattgaagaggatggaacactttcaaactcattctacaaggtcagcattatcctgataccaaaaccagacaaggacaggacaaaaacaaacaaacaaacaaacaaacaaacaaacaaaaaaacactacaggattgcttgaggccaggagtttgagatcagcctgggcaacatagtcagaaccaatctcttaaaaaaaaaaaaaaagaaaaaaattagccaggcatggtggcatgtgcctttagtcctagctactcgggaggctgaggtgagaggaccaattgagcccaggaggttgaggccgcagtgagccatgtttgtgtcactgtactccagcctggggaacagagcaagatgctctctcaaaaacaaaaagcaagctgggtgtggtggctcctgcctgtaatcacagcactttggaaggctgaggtgggagaactgcttaagcccaggagttcaagaccagtctggacaacatagggggactccatctctcaaaaacaaccaaccaaaacaaagccaaaaaagaacataggccaacatcactaacaaacatagatgtaaaagtcctcaataaaatattaacaaaccatgtttagaaacacatcaaaagagatcattcactatgattaagtgagattcatcccagggatgccagtatggctcaacatatgcaaatcaataaatgtgatccatcacattaaagagaaccaagaacaaaaaccatataatcactccagcaagtgcagaaaaggcatttaataaaagaatgggttgagggagtggagcccatagtcagagcagcagtggtctgggattttggaagtagaaagaagggcagcaccactggccaggaccaccagggaacacccccataggccctgggtgttgtgctccagggagggttccctctggagttattaatcttggtgtccactttgcccagctgcccctcacagggtcagggaggatgaagggaaagcttccttctaatgaaagttcagggactcacagttcctagagcctgtagggagaggaagatcttcgaggaagagcacctgggcattggggcgtttgagaggaagatctatgccaggtccaagtggacaacctgtggactctctctccagggacatacgggtatctgggaatctcctgtagcttaaagaggtaaagacctctccctttagcctgaggactggaggatgctggttcaggtgaatgagtcctgcaggggctggtacaggcctggagggtggtggtgtccagggccttgggttcacccttagcatgattcaggccgggcggtgtttcacatgagcaagagggcctgggttcattgcttcaggacaatggtgaaatctcatggtggaagaaatcttgtccttgccagtgcccagctttcatttggtcttggcccagagtgtcctccctagagaagactcttgtcccttcttcacactgcccttcagggatatgccagccttatgggataagatggggtggagactgtagatgtgggtgggaatctctccacagagtgctccttctctcagcggttgcaccttgtctcagggcttcagcttgaaatctgggatctccaagcccttccctccccagtcctggccaggaccacatgggcagatgcattgtgtgaagtgcatttcatttggggtgtcctctctgcatggcaccctcccgttgattctctttgcgcatgtcagagtgcaggcaccatccacacctcctgctggaggagggacggagctgttgactcctgagagctgatcatgtgttcccaccctcacacacaatcatggtccatcctctgagggacatgtgttgccaccactgtggagatggtgcaactgacagtaacaaacagtaaaatctggtactgaatgggaccttaagccaacaatgacaatgtcattccaaggtgtttcatttttattgattcaatgcaagtcacctgatttcattgactattcacaatagctcgataaagtaaatgcatcatcaccaccactttaaagaggaaaaaggtgcttgggcagtttgtgactactgtggtggctgctgcattgctctctggtaaagccaagtaggtggtgggtgcggcctctgggctgggatgatccaccctcctggtggtggcaggggagccaagctggagccatggcctgtgcagtggtagcagctgaactgaccgctgctgcaggatttgcaagctgttacattttgcgaagccatgaagcacataaaacctcaagtagaacaagtgtttcaaagtctaccaaaatctgccttcagagattattactacagaggtggatatgaacccaaaatgacaaaacgggaagcagcattaatactagataatgaatgaacactagtaatagtagggtaagccctactgccaataaagaaaaaaataagagatgctcattaacatgttatgctcttaaatcacgcagacaaaagagggtctccttatatagtagccacaatcaatgaagctaaagatttactgcaagatcaagctaaaaacagtaggtgtataatgaatttttaacttcatattagtttatgtatatgaatatcaagtttttataataaaatgcctccaaacaaagaatatttgatttagggtttaataacttctaagaggggactcagatgtttcctgtttcacagtcagtctgagagggtcatttttcctggagctgacctgggtggaggcctcacactgatactccccagcatcctctctcctgatggggtttatgctgagcatacagtggccctgggacagctccattctctccatgagtcacagacgctggtcatggaagatccactggataaggttccagagtcatctgtggggcaggtcaggatcacaacatccttttcttctgtgactctggtgttgctgactcagatggggtcggagccactgaccctgtggacaatcagtggaggtgctcaactgaaagtgggctgagggcacgtcttctcctccatccctgggtccttaaggtaactgtggaccccagaccaactgacacaggagctagaaagaaattatttaggaagttagtgagggtaagagcgtccttggcaaggtttcccctttaacaaaaagcagcccaagataattccttttctaacaaagagcagcctgaaaaattgagctacagatgtagatgagcaagatggaagcttgcacaggtgaattccagtaggtgtgccaatagaaaagggctgcctggaagccaggtatgttcaacatggagactccatcctcccttttctccattaccacatgtacagtaaaaaaccaggcaacatggcaccggccaggtagacaatccatctgcatgacaaaagatcagagtggggcagccagcaaatggcacagctggtctaaacaatctttcaccccctgtataaatcagacactgcctcctgaagctcatctataaaaccttctgcatttcactatggaagtggcaacccattttccccaggacccctctctctgtgcagagagctcttctctttctttcccctatgaaacttccactcttaacttcactctgggtgcctgcatcctagttttccatggccatgggacaatgaacctcgagtattaccccagatgaatgatgctgtttcacaatcactggttcagctcccttcttcttagggtttcacagctcggtggggagaataccacgcctcagtggtctggggagtgaggaacaaatgaagaattaatcagattttacttagaacgctatcacctgcctcaaccatcagatccatgttgggaatgtccaggcctcctctcttagatctatacccacttcactggacctgaaatcctgtgtttcccgatgtgttggtgtcactcctatgagaggataaaggagagaactttgctttctctccccactcacaccctgcacaagacagggcccaatatgagacacacactcgctcagtagttctctcatgaaggagggagggagtgacctcgagtgattctgccatctgtagtctgtgtaccctggccagtggctgtatcttcatatgcctcagtttcccctcagtaaaataggacacacaatgagaactaaaaataaaattctaattccccagtgaactgaaaggatggcctcttggccaagcggatcccagagttcctgatcatgacaggatgggaggttacacctcattacagcccctccctttggaagtttagaggtgacaactgactagcattaacgctaaaatcgagatcatgagactgacagaacagactctctgtggccataagataccaaattataaactcaacctaaggtcatgcaggcaagggctaagccacactttcctacatttaaagaataagctatgttctaacacagaattttctttctctctagcggctaaagtaacactagccttcgagataagcaatattgaaatgatcgcggctcatccaccaacactggctaactgacccctgttccaacagccacaactacacttcaattggacaggagactgatttcagtaactttctcctaataagagaccactgagcatggcctggttctgctggtatacagacacggtgcactgagtaccataatgcttgtttcatcttttgatgtataagacctaatttaatacatttaaatctgaattctccaccccaaagtgaacatggggtgcatgtagcatgcatgtttgttgatcacgcatgtgcgtgtacttcctttgtgagtatccatagctccacctataacctgttgaatatgtatacctggccaactcattcagcataaatctatcttccacattcccctcccttgaagtgcctgctattggtctctgctggaggctgcatcttctaccctggggaatggccagcctgcaggctgtaaccctgtgtaagaaataacctggttgggtgcagtggctcacacctgtaatcccagtggtttgggaggttgaagtggtagaatagtttgagctcaggagccagagactagcctgggcagcatagcaagatcctgtctcttaaaaaaattttagggaggagagtgaggatcagaaaaaatacctattggctattatgcttagtacttggatcatgaaataatctgtataccaaacccctgattacatatataacaaacctgcatgcgtatctttgaacctaagataaaagtttgttttaaaaactatctgggtgcagtggtgcatgcctatagttccagctactcgagactgaggtgtgaggagtgcttgagctcgggggattgaggctgcagtgaattatggtcccacctgtgagtagccacttcactcaaacctgggagacagagcaagaaccggtctctaaaaaaaaataaaaatagaaaaataaaatgaaaaatatatgaaataaagtctcctttccaaacgtacagatctccgatttttctgccaacaatgataaatggtcagtggcttgccatgttgtctgtgaattacttttaaaatattcacgatcacctgacctaaaggttggtaccaaggaaccgcctgaatacaccgtctctgattatttgcctccaacagagtgttccctgggcctgatctctggtggacaatgagctgctgggaacatcctctcttctctattcctcccctggggatgctgaccttcccttggagtctcctaagttccccagggcagtcggctaatgtcctagggagcttacctgtcttctccataccaagtctcatgtgaaggacgaggctttgcccttgcccagatgaggctctgggggctgagccctggctggctaccagctgcaagagccatggcccttggacagctggtaaatccttgttcccagtcagccctgcccaagatgcctcaacccagccccggcacaggcttcccagggtcacatggagtcaggatcctgggacaggggactggacaggggtttccagggctgagtttctgaacaggggcttcccaggggtcccctcactccaggatctgacatggtcctacaaggaacgtccatggggaggggacccaggagggggaactgacactgacctccccttactgagcctccccccaaccccatcagactgtccttcctctgtagcaagtgcctgcagggtctggatgcaggaaagaaattctgatctgtggaagtttgtctcccctgtgtgtgtcttgcactaaatgtccaaacccccaaatgggatgtaatgtagagggggacacaggcacagcccaggcctgaaaatcctgtgtgtgtgaagcagaactgacccccaacacccagagctcatgagacatcactgtgtacgtgaaactggccagttacttcttcattcacaagatctgtttttatgacttgtagggtgtaggatcctgtgtcattgttggtgacattctgtatcagcagacatgtattggggtatattgtctctcagcctctgtggcaggtcctggggtaattacttgagttcctagtacatatcctgtaattcccctttgtaccagttgtagccaagcctaaggcagattgtgggtgagtggaagaatctccttgccttctgcagcttcaacagtgacttgggcagtggtaggcaagttccagaaagttaaaagtgaggctaggagtggggagagagcatcagttaatactgggccctatgcattgaggtggaaagatggggccctaggtcctggacaggtctcttcatccctcagccttggagtgtgtgtgtgtgtgtgtgtgtgtgtgtgtgtgtgtgtgtgcgcgcgcgcgcgtgcgtgcgtgtcctactgggccaaggtcagcagcatgacctcccttccttcagtgcctctgaccttggcatttccctgtttggagtccttttccccaggggtctgcctggctccctccctactgccttcaggtcctgctcacattagggcatccttgggagaccccttccctgacacctctagagaccctgggtcttccctttctgacctttcgctgctgtgttccctccagggctcttgtcaatacttgacctcacattctagatacccttgcatgtctgtcttcctccctatgagagcatgagctctgtgagaacagggacttgtgtgatcttggttgcaccccagtgcctgggacaggctgcggactcctgtggatgagctcatgagtgttcccagggcccttcacaacgtgggatttattttccaatggctgaggttgttggctaagagctctgttggagttcaatcaggctggtgggaaaaatattagagatagttatagagatagacacaaatcttcttggaagaccaaaaagtttgcataactttggtaatagatctgactgaaggtggtccctttacctttagttaaacaaattaaagtagtaacaaaggaaggcagagtagtttgtctagccagcttgtttactcatgtgatcttaagactaaccattgatgtgccacaggtgcttaattgctttctacttgggaagtccacaatgtcaattaccctctaacggtgttgactcaagcctttgttaattaatcttactgaataaatatgagtctcactagctgatcaaggccatggtcacaactgtttataggactcagcagggagtctgtaagcggccctgacagactcagctggactggcaaagcaaaatatgtgtgtgtcagtgtacactattcacccgtcccccacagctggtgcccctatatgaggagtgctgccacagagctctgtttagtgtcccttgttttttttcttgagtattaccccaacttaaattgtgattattgtcatctgttttcaacattaactgctcagtgatgattcacttggaaaacattaacaatcgagattgtttcttcactaacaacctcagattatttagattttcctgttgtaatcccttcttcctgtttagtgtccaacagaagccctctgtccctctcaggtccccgttctctccaagaaaccccagccagtctctgtgctccctcctcccatccactcccagggagccctcccctcacctgtgagcagaagcgcctgccagggatgtgcactctgtgaggaggggctgagggaggccccatgggctctgctgtctgctttgtcctcctctgtggagaggagcttgggcttcagaaaataaggaggccagaaagtaaggaacaggctgagaaataatggggatgtgtcgaaaggtcacagatgccaacatctttgtcctatgcaatattatccataaaattacaggtttgagatatgcttaaattttcttctaacatgcattaaaataaacatataacttttaatagttatattaaattgtatttaatataaattaaatgctcttgtcagagctactgtgactgtcagctctgctgtccttcctctctctgtgctaagcctcctcccagggcagaagcacttcccagggccaggggtgggggcggggaaaggtaagtggcaatgaggatctgcacaggtagcctttccgcctcctcccctctcagtcctgcctccttgtcttcttttcctctttttctccaatctacatttcagttccttagaccacgctgtgagaagcaaggcttattgggacccccatcccttaacaggatgacctgtgctccccataagtgacctctgctgtgtctagggattggctctgtcagcacctcacagagagtccctggggcccccaaactcagtgttattttctctatgacacagaaacccctctgggtatgcaaggttttcctcatgttttctaatgtctgggaaggttggatttactcccagcagggaggtcacagagatgtccagggagtggggtcctagaaatggacaaatctagagctaaagcccaggtctacgattttcagttgtttttttctgcagtgctatgtgaccctaatttcctaggagtaactaaaatgcaaacctcagacatttgtagacattttatgatttttctctacagcttgtaccactgttattattatttgctttatgctttttcctaaataaatttactttacaaaacatccttgtcctagtagggtgcaggggctcacgtctgtgatctcagctgcttgagaggttgaggtgggtggattgcttgaggacgggaatttgagacaaaacatctttgtcctatgcaatattatccataaaattacaggtttgagatatgcttaaattttcttctaacatgtattaaaataaacatataacttttaatcatcatattaaattgtatttaatataaatttatatacaatacatttttatataataaattatatatataaatgtatatataatagtttttcttttttgagatggagtctggctctgtctcccaggctggagtgcagtggcacgatctcagctcactgcagcctccgccttctgggttcaaacgattctcctacctcagcctcccgagtagctgggattacaggcgcctgccgccacgcccagctaatttttgtacttttttagtagagatggggtttcgccatgttggccaggctggtctcaaacacctgacttcaggtgatatgccgcctcggcctcccaaagtgctgggattacaggcatgagccaccatgcctggcctatatattttatataattatataaagttttctataataaattttatataataatatataaaatggatatttatttaagataaagttattagttttatatatttacatatatttaggaataaatgtgttactgtgggagcccagtgcccaggcaggtagtcagtacatgatggttgtcattagggttaatactttggaattctggattttttcccaagagagtgtctacgctggaatattgggcttgtggctttctgctgatgtgcatgtgtgaagaagctacttccacttattaggacttgtgtatctgtctcgcagtttcactacctattttctcgtgatgttggtcaagtcgcctaacttttctgtgcctcatttacctaatttgtagaatatgggtaacagtacacaagtgtgagtgtgtatttcccaggactgaccactagagggcgtgaaggcaccggcacttactattacagcaatgggtgtagtagtgctcatggtcgtaaacatcattctcccatgaaaggaaccagggcttcctgggagaaataactgattccagggctggggccggaaagcacaagcggagcctggagcatctcgtgaggccagaaagtaaggagccggctgaaaaataatggagatctgtcgaaaggtcacagatgccaaccagaaggagctttgaatgaccaattttgagacaaaatgagcactataagaaataatgatagtaataaattccaacccataaatacccatgagttcctactaatataaataaataattgaatacataaatatataaggatgaagaaacagctttttcttacagcagaattccaattaatgaatgtagaaggaatgatcaaatagaaaatcactatttggctaacagcacagtcaattgtttgtaggcaagaattatcaatggactttaaatatgaatgggtaaaagtatgatgatgctacaactagtgagtaccaagggggaaaaaaaagtacgttgagaagaaacaggctacttccatattcccaaagtatcacttcaggagctacttattgattataatgggacaaatagtaacttacagtagagaaacctggcaacagagtctctccgaggtacaaaggctctcttcaggaaggaggtaaggggaaggaagaagaaaacactgtcctgcctcaattatttgctttccccattctcaagtgtacttcatagacattcaaagatatgtgttgatagtgtccacgatccacatggctctattatagtcatttattcacacatacattcagtgaggctttgagtgcctaatgtgtgcctgatatttgctagatggtggatgctgagaagatcaggtgtgctgctgtctctagggtgactgaatccacctgccccactttacagatgtggaaattaaagtgaaaaggatttataggattagttcactgtcacaaggtcactagccttaaagttacaggagtaaagcaagtttcctgacttgctagattttctgctgcaggtgctgacaatggtgagctccaataggagagaggacactcagagtgaagtgggagccctgaacaccctggattagccaagaggacatgccgggtccagctgtgaccgcacaaaggaccattggggatatttgtattctctttttcacttagagcttgaaatgaggaaaactaagtgcagaaaaccaagagtggaagatttttcacaaagcactggtaacatgcatcagaaaaccctgtgctgatgtctgtcacggtgtttctcactgaacggtaatagtctggctttgagtgtgttccctctacagcctggagttctgcgaggcagggaccaggtgtgattcatctttgtctctccagtgacagtacacagcaggctctgataaatatttcttacaaaataaaatggaataaaaagtagacatctgcacaggtgtgggatgactgagcagcagcagaagcaggaaaagtcagcgtccccagatcagctgatgtggtgttcggattctagataggggtgaggtgccaggatggggatgggggtcctgtggctctgctgccctgggggacacccctaggtttcacagtgcctgctgtggttgctgcactttgcttccccatgggaaagtgatcagagggtgtggggcttcaggtgaccccatgtgggaaatggccaagggaaggtggggtgggcggcacatggttttttttaaccaatatttgaaggtaggttgtatgaaaaggtgttaggcttatttcagcttatggggagtaggacagggattggtgagtgtgtatcaggtatattttggctcaggatggaaaagaactgtcacagtaacataaggtcttttgggaaattacatgtttactggcagagttcaggccagggctgggtgtctgaaaatacctgtcagggtcacttttatggttacaagggcagagcttggcttggaaccaggtttcttactaataccacatattaagtattataaaaactgtcctttgcaataggacattgctctatgatgcaggttgaggtccctctgtttaagtaattgtgggtggctgtgattctctcatctagtctgcgacttggacttcacctccatctgcagtccctctcctttgctgttgacactggtcagagttaagcgcatttactgacgatggtcacagggtggcagcactgcctctctggtattttctaaaacctcttcctggaactgagccagtctaagaggatgtcatgactaagaaaagggcactaatgaggtgaacagataattttttttttcttgtttctcctgtgaagtaacagagtggaggtgagcatggaataattgccttttagaaatggaagacaatggagagaagtgtttcgcaaaccttaatgtgttcacagatcccacacagatctttttattcaatacagattctgatttttctggtgaggcctgagattgtgcatgtctaaggagcttttggatgatgccattgctgctggttggcggaccacactttgagtagcaaggctcgaagatcatttagaggttaattctcactgcatctaatttatggatgaaaacaaaccaaggtccagagagagcatatacagcttgcctaacaaagccattccctaagtgcctgacttcttgcatttaaacccagggcttcagcctttgtccagttctcactccacacatcacacggtttgttcactgttgtgaacgacagttgtggcagcatctctttagtttaggaatccagagccccaatttcactaccctctttggtcttggctcatgctgtgacttcgaatagttttgcccttacttaaaatcttcagtggctcttttgtaatcacaagatcaagttcgaatatctctgtctagtgttcatggctttataacatatggtatctctttagtaaccttacctaacttccctgttttaaaattgtctcttgctgccatagccctccttgctccttcctgctccctaacaaactgtgttcacttctctctcagtggtagtgatgatggcatggcctctgatgttagactcatgtaacttctaatcccagatccaccaccaacattggcaagttgattcatctttctgaggataagcatcctcctctgaaataaacttagatggcggttgagaggggtaaataaaataacacacaaacccactctcatccctgagaccctcttcaaaactagcatataaaaatagctatttgaagaggttcagtgaaattcaaggtaacacagagaaggaattcagaatcctatcagataaatttaatagactgaaataatttttaaaaatcaggcagaaattctgtagctgaaaaattcaattgacaaaccgaagaatgcactaaatctttcaacagcagaattgatcaagcagaagaaagaatttgtgagcttgaagagataatatatgaaaactcagagtcagagagacaaaagaaaaaagaattaaaagaataatgcatgcctacaaggtttgattattaagctactcaaagagatacaagagaagggtgaaaaccaacataaagaaatgtaaaaaacaatcagaatataaatgaaaaattttctaaaatgctagctagtttttttttgagacaggctcttactctcatcacccatgctggagtgaagtggcacagtcatggctcactgcaggctcaacttcctgggctcagatgattctcccacattagccttccaagtagctaggactaaaggcgtgtgccaccaggccaggctaattttttgtatttttagtagagatggggttttgccatcttacccagggctggtcttgaactcctgggctcaagtgatccaggagattcactgccaaaaaggatataaccaagtcatatagtcataggttatctaaagtcaatgtgaaggcaagaattctaagagcagtgagacaaaagcatcaattaacttataaaggaaaacctatcagtctaacaccagatttctcatcagaaaccttacaaaccagaaggtattggggtcctaatcttttggcttcttaaacagaatagctctcagccaagaatcttgtgtagagtgaaattatatttcaaaatgaaagagagaaatacagtctttttcaggcaagcaaatgcttcaggatttgtcacggctagaccatcctacatggaatgttaaagggacttctaaatcacaaaacaaaagatttaaatagaacagaatagaacctcttgaaaccaaaaaattcaaatggcctataaaacaataacacaataagaaaacaaagtagataacgatcaacatgatgactggaacaaatattaacattgaatgtaaatgacctaacactccacttaaaagacacagattggcaagataaataaaaaatcacaaaccaaatatcagctgtcttcaagagactcacttaacatgtaaggattcttatagactcaaggtaaagagatgataaaagatattccatgcaaatggaaaccataagtgagaaggaatagctatccttatatcatataaaacagactttaagcaacaacagtaagaaaaagacaaataaggcaactatataatgataaaaggatcaatcaaacaagaagatattacaatcctaaatatatatgcacctaactttggagctcccacattcataaaacggttatgatgagacctaagaaaaaagatcaacacaaaacagtgagggtgtcctgggttttctttttattggacagcagtgtactagcctatcactttcccagtcaggggatttttggtctccccattcccctaccatgggttcatgccaaagtccatattttttattagtgtttggaattggattttttttttttgaggtggagtctcgctctgttgcctaggctggagtgtagtggcacgatctcggctcactaacctctgcctcctgggttcaagcaattcttctgcctcagcctcctgagtacctgggactacaggtgcatgccaccacacccagctaatttttgtatttttagtagaaacgagatttcaccatattgtccaggcttgtatagaactcctgacctcatgtgacagggaaacaggcactcagtgaacttcatgcgattgaggagttaatgataatgagagaagggctgtgaggggacagcactggggacaccagagcctgtgacgggctgagttgctgtgccttgggagatgcccttttgactgagccctgggaaggagggggtgtgggggcaggagctgcctgcagagggagtggcctcaggtgggcggccacctggctgcagggaagaggtgacagagttcgtgtgcagagcttggagggtgaggaggaggtgggttgaggtgaccttggtgagggtgaaccatggggggctgtgggccctgctgagggaggccagccagccctggacctacagggtggtttggtcttttttgtcccattcccagcatccactgagtggtgaaactctgcaggccagggaccatcccactggccagaaggagcgcacagtaggtgcccactcagtgcatgttgggctggacagaacctcactctgccccctgcccccagctttgggagctgcagcaaggtccctccccctagggatctccatgcctctgtctctgaggggtgagatggggagacttcaaagggccatctcagagtgtgggggatagagacgcagaagtgtgggggatagagggaggcctgggctctagacccaaaggaccttacacacctcctgagtcttttcaaatggtttcttctgttactttaaaaatgatgtaagtcatcatatttattgtaaatcccaggaatctaatcatgcgtaaaataaggtgtcttatccttgaccccaccccttccccaattaaatttccaggatgttaccactgtttgcagttggtgtgaatctctctttaataatactctgtttatctcacttgtcgttttacgccaaaatacccattgaattatattattgctgaagaccattcttttttttttttttttttttgagatggattcttgctctgttgcccaggctggagtgcaatggtgtgatctcggctcactgcaacctctgcctcctgggttcaagtgattctcctgcctcagcctcctgagtttctgggattacaggtgcacaccaccacacctggctaatttttgtatttttagtaaagacagggtttcaccatgttggtcaggctggtctcgaactcctgacctcatgatccaccctccttggcctcccaaaatgctgggattacaggcatgagccaccacacctgcccagaccattctgttctactgaatcatgtgtggtgggcacctcttatatcaatacatatggattttatcttgtgtttgttattggctcccctttttctcattgcatggctacactcaatgctttgtccacacccctgttcctgggttggaatcttgtgacagaaaatgaagtaacaaaggctaaagctttctaaagtggagtcaggagattgcaagacaattgcactttcaccagcaagagctcaaaccacagaatgttccaatagatttggataaacagctgaagtcagtattcaccagccttcaacatctcaactaggagaaccctaaaattaactaagcacatagaatggaatggacttgtgatttaggattccttctcagccaatgagctgcttctgaaaacaactttttgtggaaattacctgtaaagaaaaccctctcctgtgcttgtcttacagaacactagtcagggctgccctgattcagtggacccgaattgctattatttgtttcctaaacatatggtattttctgtgaccttcatctcaatcttttttttaagttactgggctgtttcccagttttcataatgacgagacattctgcagtgtttcatacacatgtcttttccccatgtggagtattgatccaggagctcattcagtcaacgcatgtttatgaagcatcctgtgccaggctgtgggctggtcactgtcttcagcagagagaggacaggcacagtcttgccttcacagagctcacagctcagggaggctcttagaagtgggatactggtcggagcatgtgcacattaaacatgatgaggtcaaggttgctatagggactaaaccacagtcccaccaagatcgcattgagttcctgtggtagaccagaggtcagggcccctaagatgtcctgagcagctccctctgctcagaagttttggttccacaggtgacacacctgagcacaggtgacccctgcagaacctgtgattaccacccaaagccaagagtgagtggtgggtgttctaggaggaaccgtcacctccatgggcagggttggggaagactgaggggagcaggtggctgatgactttggccagaaggtagggggatgggcaggtgtgcgctcatagggaagggaagagaagggagggcattgcaggcaacaacacaaaggttggaacctgccttcatggactgagaaaagcagggagtccacccaggctgcagctggggagggaagacatggggagcagtgggtctaggggagaagcagactgcgattgaccttggggactgggcagtgagcagaggtgtgttatgtgtgtctgtccccatcatagatatgaggaggggtgaggccgcgggtggcacctgggtcggtgggatttcatagtgcctgctgttccctagagcctctctgtatagagggtcagaatagatctgaggctgtggtctgggggaaggggctggtggtgcttaccatctctaggggtgggaggagagggatgaggatgcccctgagcagtgaagcctcaaggtgtgtggagccacagttgtctctcattagacatgtgttttgcgtgaggatgccagggcctggtggttattactgttgtcaagtttgcatgacaaggacccaggtatccagggatccagagcacagggcccctggtgaggggatgaggctcagatggggctgaccaggttcatgtggtcagagtgggagggactgatggagagacagagcctcaacccctcctgtcaggagctgtggctatgtccaggagagatgacaaggatgacccaggacattgagtgagtcattgagacattgaaggtgaggacagggcagagaggaccctggtgactgctgaaatgtaggatgtgaggagggctctgacccatgcaagttacaggacctccccacccccgagcccacagatgacccttaaattgggcatcctgagtgctgtgtgtgcccagcagggacactggataggctggacctgagtctctgtaagggcagcgctggtctgtaggaccagagtcttctctgtgggtgtgacgtgggcaggaattagcaagatgggggtgacaaggcttggcttggaggatctggtacagaagcccatgggcttggtcagctcagcttctcaggggctcagctggggctggaggagcaggatgctgtgctcagggcatgctccaggcagcgtgatgtgtgtggttccagggtcaggcacgggggtcaaaaattaaccatgaaaagttcccaccttctgtaggcagagaaaatggcctgattgtcagggtcagggagacttaccatgtggccaaagcaggctctcagcctcccagagaccacaccctgggtgcagcactcagctctgcagggtatggcaatagatgtgccaagaaccccaacatccagatgcatgcaaaaattttgcgatatataaaatagagcagatcaagtttccctgcaataacgttgttcctggttgtgtctttttcttgtaaactagacatggacatctttccagcagtctgttctcatctgccaccttcctgctgcagcacctcagaatgaacattcctgagacactgtccgtggtgctgacgaccaagagctatggaacagagtgtgatgtagaatcttctagttacctctgctctcctttcacttttaacaacagagcatcattaacaatgagaaggtggagaggtgttcaggatcttgaagtgacttctgtcttgctctcccataaccctgaagctgctgtagacattattgcagaaactgacaccacagtcaggatggccttgtccaggagcccatgtgcagtttgtagtgagcaaggatgagaaaatggtcttgaaaggggtgatggacagaacaggggcttttcaaaaatgtcacatcatcacccccagcatccgtgaatctgtcacatggtaagagaccttacagattaaatgaaggattatgagtttggaagattattgtagtttatccagatgggtccaacataatcacagaatcccttccttacaaatgagagagggaggtgggagagtcagagaaggaggaggagatgtggggatagatgcagaagacagagcggtgtcaagatgctgcactgctggctttgaagatggagaaagaggacacagccaaggatgcaggaggcctctaggaggtggaaaaggagaggaaacgcactctgccctggagcctccagaaagaacgcagccatgtgggcaccttggttcaagtttctgtgtcacttagcttgtgggaatttgtcacagcctcaacaggaacctacagaggagtcaccttgtgtgcaggtgggatccagggtcatttacagctaaatcctgatgtaaatattgcaggttgcttttcctacttcctatctcatggccaacaaccctggacaatggcagaacacccttggaaaccacggctctgtgctttagtggagggaccagcttgtttgtgggaaggtagcacctggtccaagtgaacctacatgagatcgttactctccccagggccctcagggaagggctgagaacagctggcccaggtgtgtggaggagctgcaggtgaggcagggctggaggggcctgtgggtccaggtagaggggcagacaggttgtcccatcgccatgggagcctgcacgagctttaggttggggaaccctgctcctctgacctggacgctcctgtgtggagaggaggcttgctcagtgagatccacgccagggggtaaattgggaactgatgggaaatgaggggctagagtcctgggtagtgcctgggaggaccttgctcaaggactgaattcttggtctgttcccaccttggttactctgacaacccctctctgtgtcccacggggataaagatctcctgagcagtggccattgggacagaggagaacctggtggccagagctaagcatccaggatcctggatttggggacaggcaagctcattgctgggggacagtgatagatacggcctccagggcctgggtgaagagagcaggagggctcaggacactggaggctgtgtggaggtcacacccacgatctgtaccacccatggatgctcctgcattgctcacctttgtgtggacatcagatggccccaacttttgcactcctgagacatctcatgcattcacagagggacccaggctggggctgtgcatggccttggtctctagggtagtgtgaggacagctgagcactcagctggctgggcaggactcctgcgaatcctgccctttcctgtgtagggtccaccccagcctgactcctaaccccctactcctgtctttccagggaagagagactggggttgagataaggtggagatatttttcctgtgtgacccaggagagaatggacatggagtttcaggtgagtttctgctaagttcccatgagcagaaaaagagccaatgagaggaagtttcccctttattcagatcctttccaggtgaccccgggtgggccataggcccattcactttccctgcaagcccccgcttcctgtggtgatgggaagccttcgccttggcccacccagagcccggggcagtctgttgaggtctctatatattcagcagggacccccatcccttcctgtccccaggcctgtgtctcctcaggactcagagctggttctctggctcaggctccatgtccttccccatccccagggctgggggcttcagggacgctccatcaacccacaggagcagctcccagaggaacctaagaagccacatctgctttgtggtcgatccagcagtaaatgtttgtgtcagagtgtagcaattccagtaaaaacagagaagaggtcttgacccctgaggccttctcagaacagggtctggcatctctctctgggcccacccagggctactctgggactgaacctggctgtgctcagggggttcctgctcccaggcccctccctcctctgctcaccacctcctgttattttcactgcagtttcctgaacttcagctcagccagatgccagtggggacagatcctgggtctccctggggcccaagggaccagaatatctgtggcccccactcacctcatagatgagagcagctgccctggtgctgggtaggggaatctgggcaggggagagaggggtgtcaggggacagggaaggattcctgctgtgtaggaattccagggctctcctcaggtgatggagggtcccagggtggggttagcacagggagtggatgatcctggccctgaacagaggcccagctcatggccagggcaggtctaaccttatccaagtcattctgggtagggtgggtttgtgctggggattgacagtccccctgccctgagcctgcacagctggggccccagtggaaatgggattgggaacggacagtcttacctaggagatggagctgtcagagggtccatggcctggggacagagacaaaagtgagcacgagagtgttaggatagctgggcccctcctgcaagagtgtgtgggggtcctcagttcttagagaattggggagagggagcctttctcaggttattttaggggtcaagtaagcaagtgaggttgaggaagtgacccatgacccagagcccggaggttagggctgacccggccagttggggtttcctgtgtgatgttttatgggatcctctttgcagccccagggatagggtcagaggcccctgggtgtaactggcaggagtggacaacttggggctggcttagtagttcccagccacacccagactgaagggacactcaccgggggtggaggctgggggctgctgctccctgaagtcactctgatcgctggccctaggaaaggtcagggttatttgtgaaggtgcaaggttaaaagtcacaaattggagttaaaataggggaccaggaaaggagcctatttccaagaggggtatggagacctcctttctttatggagttctgtggtaggaggggcccaggtgaggggagttgaggaaaggccttacaaagccacatctgtcctggccagaggggaaggactctcaggcagatgctgggccaggagaacattgatccagtgacacaggaaagggactgaggacccagggaaggaatcagaccaccaggggttgcctgagaggaagggtcaaggcaccagggggaaagcagggccaggcacatgtgcaggacactgaggggactgcatgcatcttggattctcctggaactcagtgtccctgctgtgaccagacactccactcagggctggagatgctgaaatgggacaatgatcttgtcttctgtctctgccctttggcaagagacataaacgacattccaggatatgccatattggggccccggttctcccttctcacagctcagtgtctgcagttaccatgtcagtcaaaggggtgctgaccccacccagcccgtccaggctgttccagtctccactatgtgataatgcccaggatcccccctcagatgccctctcactgggtggatggattcagtgaacagggggaggtaccaggtattgagcaccgctcccccctgctccaggcagctgtggctttgctgtgctaggaaactaggaccatgctcaggggcatggccttaattggactgaattcactgaggacaaagctgttgaggaagcagcccagggtcagcagctggtgaggaaggtgccatggaatgagagggaaggatccctggggagtcgggaggctggggagagcctggcactgaatacaagacagggtctccttccttctcgcctggggtcagcgtgaaggatgggagcagaatggggaaaagctgtggtacctgccagtttttcggaggagcaggaaacacacaagtgcagccaccagaagactcccaaccaggaccccgatcaggatgcctagagtgttgtcatctgctgaaagaagaaggcaaaggggatgaggtccaaatctgttccagggggaaccatgaggggccttgcagggcaggggcatggtcagggaggaaggaaatgccatggagcctgagtgtggtctgttgtgctgtcctcatagctggctcccttgctctccgtggttgcaccattttctgtgtcttaggcttgaattactgggatgcatcaactcctacattctcccacaggaagcctgcacctcatcctgctcctgtgttttttagtccctccttcctctcacatcactcctcttccccctgtttctttttttccatcccatggcagtcgtaaagggcaggcccttgctgccaactcaatgctgatgagcagggatgatgttcattgactgttttcaggggccttccacatggaaggcacagtgggaatcaatctacctgcagcttttctcaccctcccattgccttgagggagaagggtatgtgatattgtgaaatacgtatttggtgttcatcaccattgatatggttaggctctgtatccccacccaaatctcaccttgaattgtaataatccccatgtgttatgggagggaccttgtgggaggtaattgaatcatgagggtgggttttttccatcctgttcttgtgatagtgaataagtctcaggagatcagatggtttcataaagggaagcttccctacacatgtcctcttgcctgctgccatgtaagacatgcctttcaccttccatcatgattgtgagacctctccagccatgtggaattgtgaatcaattaaacctctttcttcatacattaccaagtctcaggtatgtcttcattagcagtgtgagaatggactaatacagtaaattggtaccagctagtggagtgctgctataaagatacctgaaaatgtggaagtgactttggaactgggtaacaggcagaggttggaacagtttggagggctcagaagaagacacaggaaaaaagtttgaaacttcctagagacttgttgaatggttttgattaaaacgctgatagtgatatggacaataaagtccaagctgaggtggtctcagacagagatgaggaacttcttgggaactggaacaaaggtgactcttgttatactctagaaaagagattggtggtattttgcccctgccctagagatctgcagaactttgaacttgagggaaatgatttagggcaactggtggaaaaaaaattctaagcagcaaagtgttcaagatgtgacttgggtactgttaaaaacactcagttttatgtatttacaaaggtatggtttggaattggaacttatgtttaaaagggaagcagagcataaaagtttggaaaatttgcagcctgatgatgcaatagaaaagaaaaatccattttctgaggagaaattcaagccagctgcagaaatgtgcataaacaatgaagagcaaaatgttaatccccaagacaatggcaaaaatgtctccagggcatgtcagagaccttcctggaagccccttccatcacaggactggaggcctaggaggaaaaaatgtttcctgggccaggcccagggctcccctgctgtgtgcggcctagagacttggtgccctgcatcccagccactccagccatggctaaagagggccaaggtacagctggggccatggcttcagagggtgcaagccccaaaccttggcagcttccatgtggtgttgagcctgcaggtgcacagaagtcaaggattgaggtttgggaaccttcgcctagatttcagaggatgtatgaaaatgcttggatgtccaggtgaaagtttgctgcagaagcagagccctcatggagaacctctgctagggaagtgttgaagggaaatgtggggttggaaccccgacacagagtccctactggggcactgcctaatggagctgtgagaagaagaccacaatcctccagaccccagaatggtagatccactaacagcttgcaccatgcacctagaaaagctgcagacactcaacgccagcctatgaaagcagccaggagtggggctgtaccctgcaaagccacaggggtggagcccaaggctatgggagttcagctcttgcatcagtgtgacctggatgtgagacatggatacaaaggagatcatttcagagcattaagatttggctgccctgctggattttgggcttgcatggggcctgtagcccctttgttttggccagtttctcccatttggaatgggtgtatttacccagtgcctgtacacccattatatctaggaagtaactaagcttgcttttgattttacaggcttataggtggaagggacttgccttgtctcagatgaaactttggacttggacttttgggttaatgctggaatgagttaagactttggggaactgttggaaggcatgattagttttgaaatgtgaggacatgagatttgggaggggtcgggtggaatgacatggtttggctcttcttcacccaaatatcaccttgaattttaataatccccacgtgttgggggaaggacccagtgggaggtaactgaatcatgggggtggattcttcccatgctgttctcatgatagtgaataagtctcacaagatctgatggttttagaaaggggagttcctctacacatgccctcttgcctgccgccatgtaagacatgccttttgccttctgccatgatttcaaggcctccccagctatgtggaactgtaagtcaattaaacctcatttttaaaaaaattacccagtctcaggtatgtctttatcagcagccaagaccagctcggtcgcggagatcctaacccagcagtgctagaggaattaaagacacacatagaaatatagaggtgtgaagtgggaaatcagggttctcacaggcttcagagctgagagccccaaacagagatttacccacatatttaataacagcaaaccagtcattagcattgtttctatagatattaaattaactaaaagtatcccttatgggaaaccaagggatgggccgaattaaaggaataggttgggctagttaactgcaacaggaacacgcccttaagatgcagattgctcatgctattgtttgtggcttaagaacgcctttaagcggttttccaccctgggtgggacaggtattccttgccctcattcctgtaaacccataaccttccagcttgggcattagggccattatgaacatgttacagtgctgcagagattttgtttatgaccagttttggggccagtttatggccagattttggggggcttgctcccaacagactaatacacccattttctggtatgtgactctaaagtccttagaatcttcaaagtgatgtctttttcaagctaataattgactgatgactggcagcccctaggcaacttcagaatgaggctggtcactgacccaggtaggattagagggttgggactttcagcctcacccctaatccctggggagggacctggagtttgaattaatcaccaatgaccaatgaatcaattaatggccaatgattgaatcaattaatggccaatgattaaatcaatcatatctatgtcatgaaccccaaaaggactgggtttgaagagctgaacccatggaagtttctggagtgtggtgcatctggggagggcatggaagctccacaccccttcccacatgccatgctctgtgcatctcttcatctgcatcctttgtaaagtcctttattacaaaccggtaagcctaagtatgtgtttccctgagtcctgagagctgtttgagcaaactaatccaacccaaacagggagtcatggaaacctcaatgtgaagccagtcataagaagctctggaggcccagacttgtgactggtgggaaggtggtggcaattttgtgggactgagccctctgctgatatgtccaggtagatagtgtcaggatggaattggaggacacctagctgatgtacggtgcagaactgattggctgctgggtgtgtgggagaaacccccccgcatcacatttggtcacagaagtgtgtctgtgttgatgattgttattgtggagtgagagcagaggaaaaacacagtttgagtttttccaaacagggtggaatcccatctgccaatttagaatctgaaacttatagtttcagtacttcaattaagattgaagtacttcaattcagtacttcaattaagattcagtacttcaattaagattcagtacttcaattaagattacagaactggtaagtgaaagtgatacaacaaaaatgtaaccaaagtctgctcaacttaacagctaataacaacaaagttcataaaaataataccagtcgatattgatagcactgattgagccctggctctgtgcatgaccttgttaagggctttaatcgcattaatctctgaataaatatcctcacaaccaccctgagatccaggtgtttgtaacaattctacagatgaggaaactgaggcccaggaggttgagtgtcttgcccaaggtcaaatacctggtacctattgtaaccaggatgataactggatgagtctaatccctgagttcttacccacattgctccccaggctctgaaggaatctcatccttctcattccgtgtatcattttacaccccccctccctcctaggaaaatatacaaggaaaggagtgagaggggccgagggtcactcacattttacagtcagcttgagggggtcgctcctgttggagctgactgggttggagacctcacactgatactccccagcgtcctcctgcctgatggggtctatggtgagcatatggttaaaccaggacagcttcatcctcttcgtgacctgcagacgctggttgttgaaaatccactggaaagaggttccagtgttatttgtgtggcaggtcaggaccacggagcccttctctgtgactgtggtgctgctggcttggatggagggctgagccactgactctgtggatagagtgaccaacagaaagtgtcttggggccatgctgcatcctcagagatctcagagtcaaatttagaacattctcctgtgaataaaggagaaagatgaaggacagggaggagcagagagaaccagagacacccatagcagcgagcagtagggactacagtgacctcagagaccccagggaccaggaggacccagctgcctcagaccaggaccagggagccctgaaaaccctcccacagatgagcggccccagagtcacatgagatgcaatacctggggtggctttaggagcaggcagtcagagaaatggaacatgggtctcagcccctaagggacaaggaagaggtgtggccagctcctcctaggatcctacatccaggacccagtctgtaaagaggttatgattattcctttcttttttcattaattccctccctccttcatcagagaactactgagtgtgtgtctcagttgggccttgtgcaggtacagggtgtagtgggaagagaaagctgagtcctttccttcatcctcccatgggagtgacatcaacaaatcaagaaattcatgatttcacgtccagtgagggaagaaatgtggatctgatgggagaggcttggacaatcctggcattgagtctgatagttgagacaggtgatttcgttctaagtaaaaactgactaattctccatttgcccgtcattcctcagaccagaatctccctctctgagctgaggatgcccaagaagaaaggagctgaaccaacatctggtcctggggtccacagatgccccacggtggtggccacgaccagattctgggctgcagacacacggtggtgtgacgttgagcactgacagcctgtgtgatgctgatgcaatttctctttaataaaatggggtaaatgtcaatggtccctggcttgccatcctctctgtaaattaacattaaaatatttacaattacctgacctaaagcttggcacagaatagctccaaataaacatcatctattattattttactccaaaaaaaaaaaaaaaagagttctctgggcctgattcctggtggagaaggagcggtccagagtgtcttttctctgctttccctcctcctgaggacagtgcacttcccgggacatcttttaagtttcccatccagtttaatggcctgggaagtttgtttgtctgtcctctccactctgactctcaggtgaaagatgaggctctgcccttgcccagatggggctctgggggctgagccctgcctggtgaccagctctaggaaccacggccctgggacagctggtaaatcgttgctcacaatcagccctgcccaggaagccacaacccagccctggcacaggctccccagggtcatctggagtcaggatcttgggacaggggcctggggcaggggcttgaagggctgagcttctctcagaggatcctcaggccaggccctgactgagtcctataagatctttctcaggtcatgtctatgaggaggaggccaagcggggttggactgagactgattttcccccgctgcatctcccgcatcagactatccttcttgctgtagggaatttccacggagtccggataagggaaaggaattctgatctgttatagtttgtctcccctgggtgtgtcctgcactaaatgcccaaaccccaacatgggacgtaatgcagagggggatgcaggcacagcccaggcctgacaatcctgcgtatgtgaagcagaactgacccccaacacccagaggcacggaggaatcactcaccgtatacacggagatggtgagatgcctgttcaatctgagaatttctgtatgtgacttgtagggtgtagtatcccgtgtcctctagggtgacgttctggaaatgcagatctccactgggtgatattgtctctcgaccgctgtatgcaggccctggagtcctaacgtgagtgtctattacatatgctgcgattagctggttgggctccaccgttttccctttgtaccagccatagctgtaaagattctcgggcagataaaccacagagagatgaacattctccccttcagcaacttcaaagggcgctgatgcaataaagagccaggcagtggtgggtgcgttccagaaagttaaaagtgaggctaggaaagggagagaatatcagtcaatatttgacctatgcattggcatggaaagacggggtcctgggtgcaggtctcttcacccctcagccttagagggtgtgtgtgtgtgtgtgtgtcctactgggtcaaagtcagcagcatgaccctcattccttcagtacctctgaccttggcatttccttgtgtgaaccctctttcccaggggtctgcatggttccctccccactgccttcagttcctactcacacaagggaatccctgggagacttctttcgtgaagcctcctctagagaccctgggtcttccctttctgacctttcccagctctgttccctccagggctcttgtcagcacctgacctcacattctagatctctttgggtgtctgtcttcccccccatgagattgtgagctctgtgagggcatggacttgagtgatgttagttgcaccccagtgcctgggacaggctgcagactcctgtggatgagttcatgagcgttcccagggccttccatatcctggggtttatttgctaatgtctgaggttggcagatgaagacagagtttcatgccctggtggtgtttttatttaaattgtcactgtgatatagttttactatcattttcaaaatgtagtggccactgacaatgaacttgaaaacatggaccaactgagattgttttgccccttggcaattccagttcacttagattttttggttctccttagacgctctctcccctgagtctctaacaaaagccctctgtctcctctcagagccccatcctccccaggagaccccagccagtctctgtgctccctcctcccacccactcccagggagtcctcccctcacctgtgagcaagagcccctgccaggggatgcattctctgtggggacaagctgaggggggccccatggtctctgctgcctgctctgtcctcctctgtggagaggagcttgggctccaggaacgctctagacagggttactgtgactgttgtctctgctgtccttccttcctctatgctgagcttcctctcaggcaggagcacttcccgtttatgggcaagggcggggctctgcctacaatgtctctctgtcccctcccctctcagtcctgcctcccttgtccctcctttctccttcctttttgcctatatttggttccctaggcaaaactttgagaagcaacgctgatggggtcctcataacaggacgacccactctccccagtactgacctctgctgtgttctggccttggttctgtcacagccggtagattatttccctttgtgacacacaaaaccagctgggccctgggtctcctcatgctctccagtgctccaggaaggcagaatgatgcccagcaggaaagtgacagaggtggctctgggggctagaaaggggctcactgggtgatggctgggaaggacccacccgctatcttcagtgtcaccagcctggcctctgacccagggacagagacccaggcctggaggtctcgggaggatccccagctcctaggtgtggagggaggtgtcctgtgtgtcctgggaagagaggactttgatggaaggaggtgggaggctctgggttctgctgtccttggtgaaggtttcagggggaccctctccatgtctggggtctgtgcccccagcttaactctcattctctttgcaaatacatatattttgtggatctgcagttgcctgaactgtctcatgtccctaaatctttgtatccctttttacagaaggtcaggaagggtgtgtacatgagtatgaggactatctgatcagggcgagtgtttgtttcccaaagatctctttagatatggtataatacataagataaatgtactgaattagcaattttaagtgtagaattaaatgatactaattctattcacaatgttgtacaaccatcaccataattttttaccagaaaatcttcattataccaaatggaaacttcatacttttaatcaataactccccacttccccctgccccacccactggtagcctctgatactatcaatctctgtgaatttgcctagtttacatgtctcatataataaggaattatatacgtgtattatttttttctggattatttctcttagggtaacacttttaagattcatccacgtcgtagcatatattacagcttctttcctatttatggctgagtaatatcccaatatatgtttatacctcaattttaattcattcatctcttaatggacatgtgggtggtttccacatttttgctattgtgaaaaccgctgcaatgaacttacacttggaagtatctgtttgggtttctgtgttcatttctttgggggtacatataggagtataaatatggggtcatgtggtagttctatgtttaagtttttgagaaacagccaaactgttttccagtttgctgtgctattttatattcccatcagcaatatacgagggttccattttctctacattcttgtaaacacttactatttaatattttttaaaacttatagccattctagtaggtgtgaagtgatagctcattgcagttttgattttcatttccctggtggctgatgaagttgagcattttttcatgtatttactgacaattttaatattttttagagaactatttattcaaatcatttgctgtttaaaaaaaatgggttatctttttattattcagttgtaatagttctttatatattttagatacaagtcccttatggggtacatgatttgcaaaatttttctcatattctgtgtcttctcactttcttcatggtgttctttgaagcacaaacatttttaactttgatgaagttcacttatctatttttaattttgttacttatgctcttgatgtcatattgaagaaaccattgcccaatccaagatcattaagttttactcctatatgttcttctaatggtttgataagttttgctattccatttaggtttttgaaacattttgagttaacttttgtatgggctgtgaggtaggggtctaactacactatctcgcatgtggttatccagttgttccagcacaatatgaagaggctaccattctttccccattgaggaatcttggcacccatgtcaaaaaccaatgggctgtaatggtgagggtttatttctggactcttgattctattccattgatctctatgtgcattcttgtgccagaagcacactgttttaatgattgtagtgttttagtaagttttcaaattaggaagtgagtcctccaatttttttttccagattgttttggccattctggggtgacttttaaaaaagatgtagttcaatggttctcaaagcaggagtggttcagctctccttttttggcagtctggagacctttttaggaccttaatctaagtagataaattattcccactttcttttctgagttgctatgttacagtgtatattgacacccatgaaataattgagagaccctggaagtgcttgcctacatagtgagggacaattagttccatgatcatgggcacagaagattttgttttgggaaacaattttgttggtggagttatattcatgcttactcttttatttgtcttcatagcctgcatctccttcagacttcatatctgtttattttcttgtttgtcctctggggtttgggtgttgggtgaccagtcagctggagctggaggaggtgcttagcaaggcagtgaccctggttgggaggagcagggctcagcagggtgaaagtagctgggccttgagtcaggagtggcatctggaaggcctgactgtaagggtcagaagggccagcaggtgggtgtcctaggcacaaacggtggctgctgctgtggactggaggaaggtaagaggccccgagtattccatgttcttactggctccccaactgaggattcctctcctgggctggtgctgtcctgcagcagggaggggttagacagggacggctgcacatcaggccggagtccatgtcatcctcttaggcactgtcactacagattgaggattctgttcataagccaagcctttgcacaaggaagggacccgggctctcaaggaagagcagctcctggtcagacctccatctccttctctctcattgcctgaggcctcaagcttggtctacctggcacaggggtctggatcctcctcccagggttggggtcttactgagctgggcacctgcaggtgggagaagatctggaggggccccatctgccttcaccagattgatgttgagggtccctgagtcctgcaccactatcaggtgctgagcaacttccagtgtcagtgacaaccaccccatggtggaagcagaaccacctcgtgagaaagcacctccaagcctcagtgcttgccatgtgtgggaatttgctggtttcagttgggggcatgttggtgggtggtcatgaattcagggccggattctatgctcacagtgcacatgctggatgtggtacagaccccaggcagggctcagtggggtggttttgggtgtgcacaggtatcttttctggaggagctggtggtgatttggctcccagaagttcctgagctctgcagactcaccaagcactcaatatttgagtgaacattgggcgagagagcagaaggtaagtgtcagggcatcggggttggtgcctctgggaagaggaggaacattctgggaacaaagctctcccccggcttacagggagcttcccatcgctcctgccttgaggatcagggaaactagggcctctgctcttccaggggctgcttgcaggcagtttgctctgggagggggtgacccaggagttgcctctcattttgcatttgagatttaaaaggagaagggacagtatatcttgccaggtcacaaaaattacaggcatcatattgactgaagggcactcctgtcatcactgcaatataccagaatggtcttttaaaaaaataagtgatttaggtttaccagcaactgtaatgcttgttttattcttctagttcaccgttaatgtcacttttgtagttttagcactggcaatgttgattttatgttgactctgatgattttaagctttcatttgttcacatagagatcatcttctttctgaatattaatgcattttttctctatttctactggttattcctgtacatagagtagagaatcacttttcccaaggaggtggaaagcttctgactaccaaaaaaaaaaaaaagtgtcaaaatgctttaaagtcagtaacttaaagatcaaatccaagagtgggcaacagattctgcccagggtctgaaaggtggagaggtgactggtgaggatgtttaaaagacctctcctctctactccctaaatgggggccatccagtgttcttgaggttcagagaaggcccagggctggggcagcagggcactgtcagctcccagctcccaggggccaggagtaagaccccaacactgtccagacactgattgcattcattttgggggagagtagattcttatttaaagaataatacaaaagtctacaaatatgaacataaacagaaattcctttgctacaattttccccttaataagacattccttcctaatgacatatgtgactgcattcatggctgagatgttttctaggatggtgagagcatcagagtggactatctggtgccttggggtcatgcattttcttcttccaatgtctacaggatcccccatgtcccactttgtagtgtaactcagtgtgtgtcattctggtttttgttgtatagatccttggaaagcccatgtcattcctgctgtgaggtacaggcagccaaatggcatcatctctaaacatgccttctcctggtacatcaaattatggaataaatgaaagccattttgacagatattgaagatataagtttctactcttcccacacatgcttctcccaagtgaaggattttactggtgaattgttattagagattagtgtggatcagtgactctgccaggggaaattttgccctctaggggacatttggcaaagtctggaaacattgttggttgtcagagctgggggagggagtcctgctggcattgagtgggtggatggtgctgaacaccctgcagttcacagagccccaccagtttgaccacccaaatgtcaatgctgaggagtggagagccctgctgtgccctcccgcagcttccctgaagcttcccctcacctgctcctcccatgtctccccaccacttccccacttcacccgcctccttacacctcagtcccctccacctgaactcaccccttagtccaaggccagccctgatctccgctctcctggtctccttgctccttagcaggaggcgcccactagatggcgcccttgcccttactggagctcaccgtctccctttccaccctgagacaaatgtggctgcttttactgccacaaccccagccctccacactctagatttgctcagggagcagctcctggacagacctcagggaccccagggaggagcctcactctggagattttgatggcatggtctttgaacttcactgttacccccagtcaggatccaggatgttgggagtgcatgattctgcccggtcccacttcagcaggaccccactgctgagttgtctgtggggacccgggcctctcatctccttcttgcattgcaggagagggatcttagcactgctttcacataaagtcagataatggaggagtgcaggtgagtttgggaaggtggacatgaagagaggttgtgtccctagaggtggcagcagtgagaggatgggcaggtgggaggaacacagcccatccagggttgccagccatattaggagcgacagcctttcctctaagcctccagcctttttcctgaaacattccagaactttccacttcagcacttcccactgaggctcctcaggtctgtccctgagctcccagctgagcctacctacccatctgaaatcctgagtcctgtgtcaccctcgttccccattattctgtgcagttctgtgggacgcccagctctcctgacacccccagtcttcagaatggccatcagcgctgtcgctgtggcaccagggtgactgccgcctggaggctgagtcctggcttcctgacagctgtggggcccgctctaggctcccttgtcctgatcattcatcacctccaggatgcacagcagctgggccagggggaggagcagggacaggtgtcagccaccctgtgtgtctgcaagtcaggctgggggtgtgggaggacgccaggaatgactgaactttctgatttagagggtgagagcttgcactgatggaatttgggatttaataggaaaagcatagcgttttcctattttgtaggcagggtggctggagtttggaatcatagattcccctgggatgtcactgtggacctcagtcccacccgttaggggcacagatttcagaatccacaccctggggcaaagcaggcatgggaggctccatcagcctggccagggctctctatttgtgcagctgctgcaaggagatgtgcactctgatgggaacagtgctccctcctccttggggggcagtatctagctccctgcagcccctctccctgcaggccctgccctctctgaacctcaccttccccaacccgccccccgcaatcccatctcagctgtaatcccaacactttctcatccattatgggtggactgcttgagcccaggggttcaagactatgctggctggacaatatagcgagttgttgtctctacaaaaagacaaaaattagctgtgcatggtggcatacacctgtagtcccagtcactcaggaggctgaggtgggaggattgcttgagctggggaggctgagttggcagtgagttgagattgtgccactgtatacttcagtgtaggtaacagagcgagaccctgtctcaaaaaataaaagtaaaaaaaaaaaaagaaatatggaatacattattgttaactctaatcaaccatgctatgcaatagtccaccagtaataccagtaatagccaataatgaattatctgaaaaagaatacaatttattcttagctatctactgctaaaatttttaagctatcttttatgatagctgaaacaaaagaagtaaatttaaccaaggaagtaaaagacctttataatgaaaactgtaaaacattgatgaaataaattgaaaaagacacacgcacaaatagaagatattccatgttcatgaattggaagaactgatattgctaaaatgtccttaccacccaaagtggtctacagattcaatgcaatttctgtcaaaacaccaatgatattcttcgaagaagtagaagatcctaaaattagaaaccacaaaaattcctaaaacctgcacaaaacaccctgagttgccaaagcaatcttaaacaaatagaacaaagctagtggcattacacttcctgacaatcaaagcatactgcaaagctatagtaaccaaatcagcatggtcctggcataaaaacaagcacatagatcaatgaaacagaataaaaatcccagaaataaacccatgcatctctagctaactgattttcagccaaggagccacatgcacacaatggggaaaggacagcctcttcaataagtggtgctggggaattggatattcatatgcagaagaatgaacctagaccctatccctcaccatgcacaaaaaattaactcaaaatgtattaaataaagacttaaatgtaagaactgaaactatgaaactactagaagaaaatatagggggaaaatccatgacattggtctaggcaaagagtttttggataaaatctcaacagcataagcaacaaaaccaaatataaacaaacgggatttcatcaaactaaaaagcttttatacagcaaagaaaaaaaaggccagcagagcaaagagacaacctacaaatgggaggagaatatatttgtaaatatatacatatatatttgtaaatatatacatctgataagaagataatatccaaaatatataagaaaattatgtttctgtatagttttatctgactgggatacagaggccacatccacagtcccatcctcaaaggccacttgttcccaaaatgtcaagcacatccctcaatgatccatcatcaacacctatgtctgtaggatgaagggtgaatcatgaagcactaaaaaggaagaaggaagccaatcccaaaacaaaatgatgcagggtctggaaagtccaaagcattttttttttttttttactgcatcttcctcctttcttctccacattcccaatcctcactattgattaacaaaacaaaaaaaactgggacccaccatcttccctactgtcaggagatctagcgagattgtttgagtcttagaccaaactttgccataagccaaatttctggctgactttacaatgatatgagctagcacagtctctttttctgccagtcaacttgtgctcggttttatttgcaaccaaatagaggtggtaaccaaatataggtgaccctaaaattagtcatcaggatgaaatcctaaaatgtgcaacaaactgggttgaattcaggattagtagcaacatctctgttgtgggcttgaaaagggggcacccttttatgcagtagcaaaattgctaaattgttgtttgctgagtctttggactctcatcccggattttctatgaccattcaaacagggctgcaatgaacatctatggttgtttagcttggcacacttctacatttctatatagtaatatctagaagtgcatttgctcaatcacaagatatgcacattttataattgactgctatcgaactaccttaaatagccttaatttgttctcaacattgtttaacagggtctgtttaatgtcctacgtccagcaaggacagtatcacttttcttaatatttttcaaattattggaccttaacaaatacttaatgtgcaattaattgattcctttgtattcccatgccttcttttatatgtttccttatagtacacaaaaccacattattgtttctttacttgtgtcattccaccctggaccattcctatctaaactataacattatgagagagagagagagagaaaacaatatgaaaatataaattgattaatcaaaaaaatttaaataggacaaatcaggaagacacaagagagattttaaaattattcagagaataccacaatagctgtaccaatatattttaaaacttagatgaaacggacaactatctcgataaatgtaaattaccaaaactgactcatgaaaaaatggatattatgaatagagcaataatcagtaaagcaattaaaaagacagttgataatttttatttactgacaacaataacaaaatttcaggtcctgatatttttatggtgaattttaacaaattttcaagctcctcctcaaccaattctcagaaggtttaaaactttaacaagaaaacactttctaacacattttcagaagctgttatagcatgataccaaaaccacacaagaaaattatagaccaatctcacttacaaatatacatgcaaaatcaaacaaaatcttagtgaaccaaattcagaattaataatagcaaacaagcaaaatatgttatcatacgtatggcttatatcaggaatgcaagtatgtttcaacatcagaaaatacttctccacattaacagactaaaggagaaaaacgcttgtttaattatctcaataggtttttagagaattttgaaaattttataaagttatgcgtattctgtaaaattgatgaaatccaaccttgatttatttttaaaaattgcctttcctatagaattataggtaaaggaaacacatgcatcctcacagagctacttcaaggctaagttacttcccataagtaacgtatcctgtaatgtgtgcttggcacatattcaatactaaacaaatatttgcaaatcctcaaaccacttctcgctcaaataacccacctttgtcttttgcctttatgttagggttgattttctcaattgtatcttggagatcctttggtgggtctttcagcaattaccctgaatttgcttttctgtttacaattttaattcctgggaactctttcttgttctctgactgcacccttttcatgagagttcagccatcaatcctccagaaccccaccccccccgcccccccaaaaagcaataaagatgtctaaaagcttccttctgggctttcgaatgatgtttaccccaggcatttgttctattcgttcatcacccattttccctacaacttgcctacacttgatatcagatttttatttattagtcacctatcttcttcattggcccattttcctattttgccactggttgttctcaaatgtgttatgattcctggttgtacagtcaagtggttgataatcttggatatacgataaagatttgctctgtagctgtgtgtaagcctatataaaagcttttgtatttttcttcttaaaaaagacaaaagatggttgggaagatccctccagttcaccagttcgaggctgcagtgagctatgatagcgccgctgctctagcctgtctgtctgtgaaaaacaaggggggcggggggcgggggggaagactggagatgtaaatctcccgcagggccctacccgtatccgcaacaggtctctaacaggaacagcctcaggcctgtgttggaacaaggtaggttacagaaatctggaagccagatctgtaacttcagggtaaggactggctctcagggctgatcccccgggctgggtgtcccagaggcacccgcccccgccccttccccaaggcaggccaggacaccttcactcctctccttaggctccccacccccttctcctccccactgtgcctcctggagtagcggtggcggtgccacaggggagcggggcggggcgggctctgagggcaagggggatgggccccgccggggtcactggcggccaccctggaaactcgacgcaggccggcccttctagtgaatcgtcccagccacagctggcctcccagccgcgcttggggcgcctcggggcgcgaatggtgcaggttggggagactcaccacgcaccgtcgggggtcggtccggttattcctcaccgctcggctccagtgggcgcgcgggcctctcctcctcagttcctgcgctgcagtccctccctcacccttcgcagcttgggaatccaactgtgtcattccgacggagcgccgtgaggacctccgagggtgttagcgccaagtgatctctgtccagcgctctgaatatccaagtaaaggagttcaatgaagggcgggtcaacggaggagaaaccgtgactctctcaagggagcccaaggcctccttgtctaattagtgacgcgccaatggatggaggctcttcccaccatctcttcccagcatccagtgacaccaccgccaagggacgggctcggcggaacctgcaggaaagaagcatcggctgagcctgactgcagcgctgtgaagagacaggggaggggatcagtagttggtcccgcgcccaccccctgtttccgcgaggggcggagttgactggccatgcaggcagagggcgaaatgtgaaattccactactcctaccgtttttccctgacccgatggggcggagtgtcgtcaggctaagttccctggcggtaaggtggggagattgaggcgcacacctgccgaacggtaacgcaggattagctaaggcgagctcaggacagaagcctcccgaggagcaggagggcaaaataataaataaataaataaataataaataactcactccttggtctttatttgcggcaggaattcagaaggtgaaagcggggccttaggatctttctgaccttttgggttttaagcaggaggtgtcagaaatgttaccacagggctagctggcttgtggccagcaagcgttcacaatgccctcgatttttcatccctctctgtgggttctttttttcattgtaaggcagaatttctacgattgctcacccactcagagaacctgagctggtttagaccaggtgagacaggctaggtttaccctggtgatgatgtgttgttgccatggcgatcctgcccagtaccagaggccctgcagattcagatgcttggtgcctgtgcttggctgaggggccaatgggtgaagctgccatctgcgggatgatgactgaagcctctaagtcagaatccgcccaggctgagccttagggcagctccatggagcctcggctggcctgggatagagagtccaccactgtgccagcccccagccactgcctaggtcctgtgctgagagccccttgtccagggaaatggcgtccagtggaaaagggaccacccccttgcccttcactcaaggcaggttggtgacaaccctgaagctaatccgttcctagaggagctgcttctgggtccgagttttctctgcagcagagcagctccctggatgggatctgttcaaagtccgcctttcacgcggaattttccgtccttgcaattttccacctccaccactaggggatcctctctgaccgcctcatgccggctctggcctctgagcaggggtttctcttctgcatgtgcgaccttgcgcatgcctagtggccttttgggacctagagctgctccacaccccgatggggttacagagtgcctcgcctccactccaccccaccagggttccttccctggctgggatgggatttcagaagcgccgaggaacagcccagacaggtgtgggagagtagccaaggcccctgtcccggggtggccaggacagcggtggcctcgcataggacctggctgggctgctgcaatcagtgtcctgccccttggagagcaacagtgaaaacaacaagactatcttcacccaccttaagaaagaacagaaccagtatccccaactctgctgtgtatcccaacccaattccattccccaccccactctcagtagccaatatgcaaaatattagaatactcttactgttattattttcaaccacactctgcatcctgaaaaaccatatatttcgttatgtgcttttaaacttcttgaaaatgaaatactgaggctgggcgcagtggctgacacctgtaatcccagcacttcgggaggcggaggcaggcggatcacgaggtcaggagatcgagaccatcctggctaacacagtgaaaccccatctctactaaaaatacaaaaaattagccgggcgtggtggcgggcgcctgtagtcccagctacttgggaggctgaggcaggagaacggcgtgaacccgggaggtggagcttgcactgagccgagatcgcgccactgcactccagcctgggcgacagcgccagactctgtctccaaaaaaaaaaagaaaaaagaaatactgaattttcaaatacttgctttttttttcggtcaaaattatgttctcaaatttcactcctgtagatgtgcgtggctggctgtagtttttgcatttttattattaggtattctcctgttgcattaatatgccacattttatttctctcatgtttttggtgaccacttggggtgttttttggttttgtatttttgctgtatacatgctgccatggtggacatacctctttatacatatttcctgttgtatgcagacacaattttaggatgtgacatcttcagcttttctattgtgtcgtgtgtcttttccttcgtgctttgtgttatttacatattctggacacagattctttgtcaactgtatgtgctgcacatctctttcccagtttgtgtcttcttcttcttttttttttcttaaaaaaaactttctttatagtgttttttttttctttctttctttgttttgttttgtttttttgagatggagtcttgctctgtcacctaggctgaagtgcactggccgatctcggctcactgcaacctccgtctcctgggttcaagtgattctcctgcctcagcttcccaagtagctgggattacaggtgcctgtcaccacacccagctaatttttgtatttttagtacagatggggtttcaccatgtttgtcaggctggtctcgaactcctgacctcaggtgatccaccctctttggcctcccaaagtgttgggattacaggcgtgagccacagcacctggcctgtgttctttcttaagtagatgttacttttaatataatagaatgtatcatattttgcttttatattagtactttttctatctaattcaaacacatccccaagggtctttgtgtgtagactgaccaatttctcaagaatcatgaatgaatactgcttctctttccccaatttatctgtaatgctacctttattataaagtttctatgcatgtgtagaaatagttcctgatttttcactctgtgccaccagcataccaatagcacgctgtcttaaatattaaatagcagagctttatgagacaacttgatgtgcagtaggcaattgcccccttgttactcttcttcagggttctttgttgtaccacatgaattttagaattggcttgtccagctaaaagacaactgcaaggattttatttggaagttcataattctatacataatttggggaaagtattttcataataccaagtcttcctattaatgaacacagactctctctctctctcccccacccccacctgtttagttatttatatctttatggtctgttagttattgtttattgtctttcaaccaggtttcatgtttttctacatagaggccttgcatgtgaaagtctttcttcctagcttgctattacaaattttttttaattgcactttttgggtacagtggcttgtactgtaatccccgatacctgggaggctgaggcagatggattgcttgagtccagaagttcaagaccagcctgggcaacataatgaggtccctgtctcaaaaagtttgttttaaaaattgcatttgctgttattcaacaaatgtcattgtgtctcatatatggatttttatatctgataaccttgttcaacaatcttttgattctaacaatatatcagattcttttgagttttccatatagacaataatgtcatctgtaaattataattgtttcttctttgttatttcttggaccttttattttatatttttgtcttgctgcaaggcaatatccctctatatattgtggggtcttttttctcataaagtggggatggtgaacacccttgtcttgctctctgattgtataaagcatgctttctgtagcattttgtagacgctcttttttagattgaggtaattcacttttatttctggtttactgagtttttagcataaattcaggctgaatttgagctaaagctttttctggagacatcatttgaaaaattcatatgatttactttctttaagtcaccaaagttatgatttacattgaactgagtttctactgtttaactgtattcttgggagaaaacccacttgtcactgaacaatatctgttttatttactgctgtcttgtgtctaaattttcttttaggattttttgtatatgctcagattagcctgttattctcctttctgtatttttttctggtttgggggtcaaagttataatagcctcacaataagagctaagaaaccagccctaatggaggccggggcaggaggtttggagttcaagaccagtctgggcaaaatagtgagacccccatctctatgaaaaatagaaattagccaggcatggcagtgagtacctgtagtcctaggtacttgggagggtgaggcaggaggattgcttgagcctaggaatttgaggctgcagcgaactatgattgtgccactgtactccagcctggatgacagagcgagaccctgtctcaaaagaaaaaaaaagaagaaataaaaaggaaaagataaaagagctaagcatctgtttccttttttccattttctgggagagtatgtgtaagactgtaattaactgtttcttgaataatgggagaactctgtaaaataatctggctttggtgttacctgtattggaaggatgaaaaataccaattcagtttcattattggttgatagggctactcatgctttttgttttgttttgttttgttttgtttttgagaggaagtctctctgtattgccctgttgtccaggctgagatgcaacgttgttcacaggcctgatcctggctcactacagcttctaacttccgatctcaatagatcctcccgcctcagccttcccagtagctaggactacaagcatgcagcatcacatccagcctcttttcctgcctgacccagttctggtttcctttagttttctaggtgttcatccattttatctaatgtttaatgcatttggcataagggtgctcagtgtcctttcattgtctgttgtctgtaactgttgccattttcattcctatttatgagtactggcgtcttctctcactttttcttaataatcctgctggaactttgctttttaaagaacatcttttgacttgttgattcttttttcatacatattaactattttcttattttttgcctttatatttatttcttttcctgtttgaaacattgctcttttcttactataaaaatgggtaagtagctcatgaattaccacctcttttaaaaatcttttctactgtaagcattttagcagtttacatttgcccacaagtaccacttcagctacaccctatgtgcttttacataaagtcttcatttttggtaagacatattctcaaattttaattatcacttgtttttaaatccatgatgttttatttgaaatgttgtttctaaagatacattttctggttatacttttattcttctaatttagcacagtggccacaaaacatggtctgtgcagtgcatacaatcgatgagtaatttctgagctgtagtatttggcataatatatggcaaaatttcctaagttttccatgtgtgctttaaaaaacttccagtaaaatacataaatctgttagatcaagcttctcacattgttcaaatagtctatatgtttactgattcatttgactgcttgatttatcaattacaggtaggaatgtattcaaatctcctattaaagtgtgacactcaagtggctttttaaagacagagatgccaaaccaatgaatacatgattttccccaaagcctgcacaaattctctaatgaaattttaccatgaaagtttgtttaattaaggcttactaaagcagtatgttgtcttttactttttaaacagagaatatatattttaatacatcgtttaagtttatgattaattatctattactgaggataagaatctttgcctgtgctcattcagcatttgcacttcatttatgatctgccttctcatagcttctgttaatttttatactagagacatttatttgtttgtataaatgttgaaggtttttttttgttgttgttgtttttgagtcagagcctcgctctgtcacccaggctggagtgcagtggcatgatctcggctcactgcagcctccatctcctgggttaaagtgattctcctgcctcagcctccagagtagctgggactacaggcatgtgccaccaagcaaggctaatattttgtatttttagtagagatggggtttcgtcctgttagccagggtggtctcgatctcctgacctcatgatctacctgcctcggcctcccaaagtgctaggattacaggtgtgagccaccgtgcccagctgggttttttatattataaggagatgtaatagatagatagatgtttcaaagatagtcaaatgtttttaaaatttaaaacacttttttacaggttgactttcaccatttaatttcatctatgtgttttgccttagagaaattttaaatgctatgtagatctcatgacttataattatgaagcattttgttttctgttttccacgaaacttagcttaactttgagcatataatagttgtaaaggtaggagagtaacactgaaaaaaggaattgcataaaaatggcacattttctgtagagttgtttatcgcctgaaaataggccccatttcatggaagtaagatgatcaggctcaggtccccagacgaaactcttggcatggtttttggagatagtccagggctcagtactggctctatcatttgctacttctcccaaagtaaccaatatctcatccaccctgagcccatttccatatctctaacatgaggataatagcatctaccttacacaccaagtagagggatcaaatgtaggaactaaatcaaagtaccagcactgaataacctacatcctcccacttcccaaaaggaagagagatgtatcccctgttgacaaacgagaccattttgcaggagagaaaggaaatgccagttcacttgcaatgtaaacatgctctctctttttagggatgtccagggacctgagagagaacccatgcttaccaaagagtttctagttccagacacacaggactcgaagggtgacaagtatggttttcagggtccctgaatccacccagtcctcacagaaactcctaaaagctgtcgattgacagcgttgagttcacagctctggtcctcacatgctgatactgcttgtgatatcgaacccgacaggaccccacatcacaattgatttaccaactacaatataatacctcctgaatctccaaattggctcacccaggaacaaaggcttggggtaaaactggattaggagatataagctctgaattttctgagggtgagacacacaaggattctaagtgacacgccacagagtaacgggtctgtgactggaggacccacagatttgtcttactggagacaccacatgcacacaaactccatccttagctgtggaaacaagggtcttttgctatcttagccgaattctgggagtaatttttggaggggaggagatctttgggattgcctctttcaggccctttacaaaaatacctacttcttaaatggtaaagcttacactaaactgaaaaaattacatccttggctttttatgaagtaggtgttggattgaatcactactggaagaagtatggcatcgcaaattctaagcagtggtcaaaggatggatctgttaaattagaaaaatctctaaatttataaaaagattttagattcctttattctaaacaattgacctatttgtactcatgggacaatcaaatttcaaaggagatatgtaacgatttcatggcttgcattaaaaatccttctgataaaattaaagataaaaaatctgaccccctgccaaaaaaatcttttgaagttcatactgcctgctttcaatattctgtgggattcacaatgaaaggtgccttatattgtggcctagcttcaagtttatgccttcgccaccatggcctgggttcaattcccagtcagggccccagcgcctttggtttaatgtttgcgtggcatttgacttttttacctatttagtattggtgagattacctttggtaaaaaaaagtttaaagagtggaaatcgcaattctttgtgttggctaaaatctgattataagagatctggaaggttttatttttctttttcaaagagctctatggtcagaagtcggcttcatgaaaagctaatatttaattatatgtacatacagtctttctggattttctcttttgcctcctgttttgaaaaatatttggatttgagtgaaactccgttttagaaattaattgcttggtacaatatacccatgtaactaccctgcacatgtaccccctgaatctataataagagttgaaattttgacaaaataaaattagattttgaattaaaacaaataggtgcttggttcctctgctcacttctttttaaaaggaattcctctcccatgtacttcttcttttcccttctttaccttccttttggcatctttggtatcacatgaagggatctagagggaattttaagtgactctgaaattccttgagaaatacacaaaaagatcccactcaccccttttgggggtctcctgttctccttgtggagtccagagtcagggacaggctcctccaggtctgcagctctgctctcttttatttcatcttggctgattgctttggttttgtgagtaccaggcattactttgtactgtgagagacacgtcctttgtgagtgcaacggctgctgggtcactggtgagggctgcagtttggagatggctgagagccgttgcaataaatggttgtgattgcagggggctccttgtttctttgcaagtttagatgagaaaggtgcagtttggacacagtttaaaggctgtgaaaacaccaccaatgaatatgatttcctttggggatggtctgattaaaagtgggctgattgttgctgtgctactagccttgaagacatgtttctacagcattgtgcagtgtggaaaaattgtgtggcttggtcttgtggcatgtcccttcttttagagacctcagattcaatgtgaaattcgggatttttgattttcaaagatctagatgccctgccttccagatgtgcctactcttcacatattttaaaattagatcctataaactgcaaatactttgttggcttctgtgagatcagaggtccagttagaaaaggaagacagtttgttaaaattaaaaactatttatctaatctaactagattggcctccaaatatgactttctgacattcagctggttactctgaaaagatttctaaatctcttgaggctcatctatatgtttccttgcaaagaaaaaaaaaaaaaaaaaaaagcaagcccaagcactagtaagaaaaagatttgcaatgtttcatgaaaggagtagatgagtgaagcatttatttgtagatactgggttggatacctgtgcaaagaagaagaggtcaataataaaaattgccaggggatttcttggaacttaacaagctgaattaaatatagaaatgtcaggaaatcaaggcaggaaatactcacttgtggttaggcagacagggcagggttctgagcttgagatggagcaaacagttgtggtgggtgaagttcacatgctttagagctcagctgtcctagtaaagaagcctaagagtctctaaagctcttatgagaagatggattttttttgcctagattaaaaggttaaagaattgctttaagttggataaaataaagctaaatgtttaagcaagttgtgaaaggtttatgaaaaaattaattaaaatatttttgtgtgtaaacatattgactaaagttgaaggggtataattcagcatttctgtaaattgagcattgaaataaaaacacaatgggtttctcttagagcactaacctgctctttaacaaaaattgtaaagggttatagaaagtctataaaaatgttaccttatggtcaaacattaaaattgggtaaatatgtctatcaggttttattaagaattaggtttaacattaatagtacactaatgtaaaggtgaaatttggcttatttggtacaaaaatcatacaggaagcattgtgaaatataaaatgatttttagctttctttgggctatatttctataaatatgttattgatgagggttccaaagttatgggagactcctataattctgctatatctcagtgtacattatcagtcataattataattgtcatgttaaattattgtgggccacagaggtaacagatttccttgtcaattgtgtctttgactatgactaccctaaaacgttcagtcacccatatacacatgttaccttgttttggccctctttagaaggtaattttataatcagctataaagccctaacaggtgctcttaaatgcaaattttgataactttggagattgtgacatcagaagagaggaaaaatgttcgggacacttggagagctaaaatgttcattgatatcaagcaggacaggaattaactgcatgaagtgaactaataggaggctgaagtgatctttttgactttttgcttaaaacgttgctgatcctttgttttgcttttcagagtcaaggcaaattttcttttgagctattgacagcttttaacgattaatcaaaatatactcctatgaacaccatttggagcattatttgtttctctctacccgatttccccagaatttggaaactatttgtgggtattcttaatttatggcaatatagttatttgcataagtgcaataagaatgtgttttctttggtaacaggacacaatttgaaaaactggttattttaccaaggttttgaccagaatgctgtgctttcctttaaggaatcaaacttgacttgtggagctaataaagcctttggaaaactgaccttatatcctgtgaacacagtccctgtacagggttactgatctgtgggaagaaaagaatgtcacattctgacaggtcaggaatcccaagttatcttgaaacttcaagaggacaggaattcacccaaccatatgtatttgatggtagaaatccatggcaggggctcagctttaaaaagtcttatctcagattccttctataaaacaaagtcccattaaaaccaattttaaaagcctatgtgaaaaataattattcttgctgcacctcgtacaaataaagtggcaaagcataataaagcaaattggtcctgtcgtaatttgtctttagtaaaaacgggaaactggggtcgggtgcagtggctcactcctgtaatcccagcactttgggaggctgaggtgggcagatcatctgaggtcaggagttcaagaccagcctggccaacatggtgaaaccccatctctacaaaaatacaaaaatgagccgggcatgatggcgggtgcctgtaatcccagctactcaaggggctgaggcagggaagcggaggttacagtgagtcaagatcgtgccacttcacgacagcctgggtgacagagcaagactccatctcaacaacaacaacaaaaaagggtaactggagagagggaagttatgtttcaaaaacttttggaaactatagtacacctgtttttaaattctagtctggcattcagtttttattattttctacagtttgggttaaattcgtatttctctggctacaagtctcctaaataatcttttcatttgtttcctttttctttccctttttccccatttttcttaattggaaatcactgaaacctaagctgtgctttcttaaagccctgtgaactgaagactagacaaccgaaacttctgaaggaagtagcagcaacctatttatatgtgttgctgttgcctactattatgttttagcaggtgctgcctctacacccccgaaacagagagtgctactgggaacaaatcgactttttccactccagtgctgcattcggtgccccataacgatgaccccctctcagcaggaagtagccagaaagattacaatgctccatctccctatgattcttgtgataaataaatatacaagcatgatagaaatcatgcgcaaattgacagtggggattgtggcaggccagatttcactaatggaggtccccatcacaactacttcagtactgactgagtggttaagttcagtatcaaaagctgaaagtgccagcgcctttctacaaaggctagaatgtaacaaaagcccaccaagggttttacctaggcctttcctgggccttacagcatgacaaaacaaagaaggaattcttaaccagacctgtttaggattaaacaaatttaattgggggtctgaagaaactcgccaggcctccacaaacaagttcattgggggtctaaaggaaccccccccaaacctctgtgattgagcaggagacaaggtcagggtaattgccccagcacctggactcatttagatttaagtaaatgtactgaggctccagagaaaggtctccaagacttagactagagttacagattaaaagaagttaatcacttatatctttagataaatgcacactgacacgtagacatacatcttagaaaatatataagctctggaaaaccttgtaatttacagttggtctggagatattttctgggccttctctctgtaaccggttccagaaataaaaaactctcttcctccccagtttatctgcatctcgttattgggccgtgagaaatagcagccagaccctgagtttggtctgggaacacactggctgggcttcctgcctggcggtagagcttcactgtcctccttcccagccaaaatgtggcccttgaaggcttcctccccaactgaccggttttgggttctaggtactcagggaacaccgtcttcaaggaggccattttcatactgttcctggtttgatttttctgaaattaggaaatgccccttgaggcatccaggattgtctttatttcccctgaagcttcccctcctgaagaaaaaagttctcaaacaccctcaggactcaaaccccaagttcaccctgtgaaacattcccatttcctaaacccaggcaggctcatggccctcagcctctcagaccccatggaaacctcctcccccacttcacgggttctctccatattgagagcctcccctcctcggcacacaacccagagactcaccccaacatgtgtagcaaatcaccctggaaacaatcatggctgaacgtggtagcccatgcctgtaatcccagcactttgggaggcccaggaggtggatcacctgaggtcgggagttcgagaccagcgaggccaacatggtgaaacctcgactctactaaaaatacaaagttcactgggcattgtggtgtgtacctgtaatctcaactactcaggaggctgaggcaggagaatcacttaaacctgggagacagagattgcagagagccaagatcgcaccattacactccagcctgggcaagaagagtgaaactacatctaaaaaaaaaaaaaaaaaaaggaaaaggaaaagaaaaaaaaaatcatgaggcaacattgcatttaacaatattttatttatcaaaagacacttgtctttctcaggtaagtgaaggtctagagatgaaacgagtcccgatgtaaattgccccatgggcattgctgagatcacaagatcatcactgcagcatgcagcacaatagtaaatttctcaggatggaagttcaacaatccaaaaggtagtattttttttcatgatgctcagtccatcatacgaaataaaaataaattccttttcatgatcatccattcagtagaaaaaatgatagtaaatttgttctcatgaagatttttaccgtaacatataggatttatcgttattattattattctttgttttttgtttttttgaagcggagtctcactctgttacccagtctggagtgcagtcgtgcgatctgggcacactattaacctccacctccagggttcaagcatttctcctgcctcagcttcccgagtagctgggattacaggcatgcgccaccacacccggctaattttcgtatttttactagagatggggtttcaccgcattggtcgagctggatttgagctccggacctcgggtcatccgcccatctcagcctcccaaagtgctgggattacaggcgtgagccaccgcgcccggcctcaatttatcattattcacgcatccacaaactgggttcttatattttgtacgtgattttttccattgaggagagatatctgtgcatattcatgctgctcatatttcatccacaaactcggttcatatttcatccacaaacataattttttccgttgagaagagatacttgtacatatttatgctgttcaaattcacatttcatcattcttttacaagaaatagataatgtattttaaggttttccagtggtattacagatattttactgggtgtatagatagaaattaaaccaaacttctttgttctggccgccagtcatgcatcctgttttcaacatagttcacatacaactggttgtgtaaaaatgaaattattttgtttagtacaatcatcaacagttggttgattagatttttaattatcaagttaatcattgtcattatgcttctcatcgcactcgtcattaattgctgtgggaggaaatttgttatgttccctatgagagggtgtatcacaaattcaaataagaattcaacgacaatggactgtataaaggaaataagcaagtccatggaaaacatatttttttccggaaaggattaaaatatttttaaaaaggaattaaaaaaaaattgggcacggtggcaaatgcctagagtcccagctgctcaggagatggagacagaaggattgcttgagcccaggaataagttggaggctgtagtgaacagtgattccaccactgtactccagccagggcaatagagggaaaccctctttctaaaaagacaaaaagaaacaaaacaaaacaaaaaaacaccacatcaaaaaacccaacaacaaaatgaaaaaccaaataacagcaatacaattggagctattcgatccaaagaagtaaatgaaacataaagcaaataaaagagaaaagctaatacctgtgtcctgcaggactcagtccaagttctgctctgactccctcctggtgagccaccccttaaaaagtcacttggggcggggttactttgacagacagtcttctgtcaaagagggaggcggtaaatagcacttttttttttttaatttaacgcctttccaacaaattagcggctatgttgtctaagagtgcaaatgtcagaggtgggtacaggcagcaagaccctccccacaggggcagcagaaggaggaatgactaagggaacaagactttagtgtgctcaactacacaggacaggaaacagatgctttttacaaaagctggtggacttgaaggcagaatattttcaagttcctgtaactgcgaactatgacctgtagcctgtgagagtgactttctgtggcaaaggagcttttgtgaatgtgaggaagttaattatcttaacagtgggaggttctcccggcttatctagctagaccctcgtgaaatcccaagtgtccttaggaaggggaagcagagagagatttgagtccagaagaggaagaaggtgatgtgaggcccagtaggggaacaaagggcgatggcatgtaaacacttagcccccagaagtgggagagggctggggttcatcacaccagaatccctaacaatcagccttattttaattacccttgaaatggaaggaggccttagagagccagaggcttggaggggcaccctctgctgcatacacagatcccaactgctgtgggctccaaataattgcaccagggaaatcacaaattatcaaaaataaaggatgtaaagcttttaaaaaatattaaaagcccaacaaataaaaaaagttctaaatctataaaattgacctcagtctgtatatttagatgagtcatgtgtatatagcgtttcacttcaaaatatatgataaatctctcattcattggcttaaaaataaacacttcaatcaagtctttatcagaaaaattgaaacgttaactcaattgccttttagttcatgtgactttacaaaacttaaaacaataaagtcagttttaaaaattattagtaaagtaaaagaaaaatatcttcacaatgtagacattttgtccacatgagacatgtgaaatattgccattactaaatatttgcaggtcaaaaactgtttccaaaacattttaaataatcatctggcctgtctgttttagagcattcaattctagctgaggtctggggacatgtgaaaggagccacggcccgactccgtgctgggaagagtcagacattttccacagctctgtcctttgctgtgggctctgcaactcctaccaattaaaattgcttacgtttttgttttatttttactaaagaggggttcctaaaagctaacattatactgagtatatgtaactaaaactactaagaaaacaatttcacaattatacaaatgtgccaagtaaatgaaaaaataaactgtattttaataaaggttataaaaagaaaaacatatagtggtgtgaggactgtctcaggtcttcactgagcaagggatcatgacattctatggcggacagctgaccttggctttctgctcctcttgattatgtctactaagtgacatacttactctttttccacctgtcttgcctctaagggtaacaggttttatgagatccctcctagtgctttgcaggtcagcctccctttgctgcattccaattttactgcctataccctccagctggcttttgatgacaaaagtcctggtcccagccattctcagattctgtcatccccgtgggcactatggagctcagcactatgggaggttccccaaaaatctcgttttctatgaggaatggccaccacctgcatctcagtgatgctagtgacccctttcctactcctgtgctcactggtcctcatgaagatcctggttggtctgtagccccctatttttcctattaaagagaaattacagtaagacccatttgtgtgcaaaatcaattttaggcttattacacttggcctgataatttgcataaaatgcagcaagaattcatcggccatataggctacttttgagttaattttcctgggtttttacctaaaaatatactattttggttagagtcttgtgaaaataaccaatgtgttcaattgttttattttaaaaggctcttactgaacactataaatatgtataagttgaatatacaaactatattgtcataaaatcacaacccaaaatgtggagaacgcagagggaaaggtaaatttgctcgcaaaaacatacttcacccaaataactggaaaaaaaaaaagactttcatgacccttctttaaccagagcagcagctttcaaacaaggtgtttgccttggaaatgccattcacaagccaaacggcccttgagagctgtctgtcaggcactgtagaatctagcagctcctcacagagttagaaatagtttcaggaaagagattccctgcttttagtaactgcactttatattcccagatagcgagattgtatgtaaaccatttttatcttattctggaactcttttgggtactttttttttttttttttaaatgatggagtctggctctgttgctcaggctggggtgtagtggtgcgatttcagggtatgagaaaatgcagctggacctggctctttccaggaagaccctcacagccaaggagtccaaagcctggggttttcatctaattccagtgtgactggggtaggagcagctttggtgctgggtgtgtgtgtgtgtgtgtgtgtgtgtgtgtgtgtctatgcctgtgtctgtttagggtgttaggctcgtggttgtctagatacaaatgtcccagggctcaggagccccagggttatgtcaggggcaccagatgaaggtgtcaacagaagttagggcacaagggacaaaggtgagagcaaggttagattcatttaggtgcaagaaatcatagagggaggagggagaggaagccctcctgctaccaccgaggaagaagcgcagcttaaggcagaaagcctgtccggagaggaagtgagtttgagggcagggctctctgggtaaagtacggtctgggacaccagcctgggggaagggtacagaatgcagagtggcctggcgtggggactaagaacagaggagagcagctttcactgggagggtcagtgttttcagtgtccagcactgagcaaggtgagatttgggcagcttgctgtgaaataaggtcaggctctggcattgtccccattgcgtgtgtgtgtgaggggcactttgggagagtgaactctccacctccatcctctcatacgtccttcaaccgagcttgccagttaccctgattccaaggagatctatttattgttgacaatactggatcctagcagaggctgggtaggagcctgggcacaagcaagtggaggagggggcctgggcctgaaagacctgggaggtttgagagaggacacagcccacagaatggagcagatggggtagagtcggcaagcattcagggctcctagtaagttggacaatggagaccctgaaagatccagtaaaacggggagaacaaacaggtccccaactcacatccttgcagtgcctggagcttcagactccagacaggtggggaaggaaaattgagggatgtgaacatgttggagaatgtcgtgccctgaagaatgaagaaaaggggggtgaggaatgagagcaggaacggcttccagtgcctggtgcccaggagaactcagaaaatgggtgtggtggagaggaatcgaggaaccggaagtggtggaagtgtgcagggcccctccgagatcactgtgactgccaggcgtcctccctggctggagagcttcactgtcctccttcccagccaaaatgtgtcccttgaaagcttcctccccaatggactggttctgggtcctatatatttgaaggggtggcctgcctctccacacctgtgggtatttctagttgggtgggaggagagacagagaaaagaaataagacacagagacaaagtataaagaaacaacagtgggtccaggggaccagcactcagcacaccaagggcctgcaccggcaccggcctctgagtttcctcagtttttattgattattattttcattatttcagcaaaaaggaatgtagtaggagagcagggtgataataaggagaaggtcaatgaaaaacatgtgagcaaaagaatctatatcataattaagttcaagggaaagtactatgcctggacgtgcactcaggccagatttatgtttctctccacccaaacatctcagtggagtaaagaataacaaggcagtattactgcaaacatgtctcacctcccgccacagggcagcttttctcctatctcagagttgaacaaatgtacaattgggttttacaccgagacattcagttctgaggggcaagcaggagacagtggccttcctccatctcgactgcaagaggctttcctcttttactaatccacctcagcacagaccctttatgggtgttgggctgggggacagtcaggtccttctcatcccatgaggccatatttcagactatcacatggggagaaaccttggacaataccccgctttcaagggcagaggtccctgcggctttccacagtgtattgtgcccctggtttattgagactagagaatggcaatgacctttaccaagtatactgcttgtaaatattttgttaacaaggcacatcctgcacagccctaggtcccttaaaccttgatttcatacaacacatgtttttgtgagctccaagttgggtcaaagtggctgggtcaaagtggctggggcaaagctacaaattaacaacatctcagcaaagccattgttcaaagtacaggtctttttcaaaatggagtctcttatgtctttcctttctacatggacacagtgacagtctgatctctctttcctttccctacatatattcatggaccacagtcttcaaggagtccatttcctcactgtttttggtttgatttctctgaaattaggaaatgccccattgaggcacccaggattgtctttacttcccccagagcttccactcctgaggcaggagcttctcaaacaccccccaagactcaacacctaatttcaccctctgaaaccttcccatttcttaaatccaggcagggtcatggtccttagcccctcagatgctgtggagaccttctttccctttcatacattctctcaagattaaaagccacccctcctcagcacacaccccagagactcaccccaacatgcattgcaaatcaccctggaaacagtcataagaccacactcatttaataatattttatttatcaaaagacactctttctcaggtaagtgaagttctggagaggaaaagaggagtcctgatgtaaattgccctgcaggccttgctgagatcacaaggagattgttactgcagcttgtagcacaatagtaaatttcttctctggatggaagttcaacaatccagatcgtagtatattccttttcattatgctcagtccagcaaatgtgatgataacaaattccttttcatgatcatccattcagcagagaaaatgtttgtaaatgtgttttcatgaagatgtttaccataacatacaggatttaccattatcaatgcatccacaaactctgctgttgttttttatacataattttttccatcgagaagtgatagttgtacatattcatgctgttcatatttcaaccacaaactctgctggtttttttatacgtaattttttccattgagaagtgatacttgtacatatttgtgctgttcatatttcatgtttcatcatccttttacaataaataggttatattgtattttaagtttttctaactgtagtgcagaaattgtactgggtgtatacatagatatcaaaccaaatttacttgttctggctgataatgcatcatttatttcatagattatgtatttctttgacacatttcacgtacaactaattgcataaaaatgaattttcttttagtatagacatcagcatgtgcttaattcggaatttaattgttgagttaaacatcgtcattgccttttccgttgttattaattgctctggtgggaattttgttatctcatacataagacagtgtgccacaatatctcttaaaatttcaatggcaataaactttatatttaaaaacagggaatctatggaaaacacatttttttctaaaggattaaaatatttttttaaaataattttctaaaaagttaggcacggtagcaaacgtctagagtcccagctactcaggaggctgagacaggaggattgcttaagcctacgagttgggggctgcagtgaactgtgattgcaccactacattccagccagggcaatagaagttaaccctttttctaaaaaaaaaaaaaaaagaaagaaagaaagaaaaaaagcaacaacaccaaaacctcaccaacaaaatggtaaagaaaaaaaaaacagcaatacaatgtaagctatttgatccaaagaagtcaatgaaatttaaaacaaatgaaagggaaaaagtaatacttgagtcctgcaggactcagtccaagttctgctgtgcctccctcacggtgagccacccctttagaagtcacttgggtcataagttaacccgataggaagtgtcctggccaatgaactagggaggtggtaaatggcaccattttaaatttaaattcacggccttttcaacggatcagtagccatgttgggtaagagtgcaaatgtcagaggtgaaaagaggcagcaggaccctcccctagtgcttgggcaacagaaggtggaatcactaaggggacaagactttagcatgctcaagtacacaggacagaaaacatgctttttacaaaagctggtaaatatgaagagggaacattttcaagttcctgtaaccaagaactaccgcctgtaaccggtgaaagtgactttctatggcaaaagcgtttttgaaaaggtgaggaagttaaatatcttaatgttgggaggttcttctggtttatctggctagaccctaatggaatcccaagtgtccttatggagcggggagcagagagagagatttgagtccagacgaggaagaaggtgatgtgagtctgggtgcgggacagggggagaatgatgctatgtggggatctgggctggggaatgacttagctgcatgagcggagtgacttagactcctgaactagaagaaatctagggctcatcacctcagcagccctaaccatcaaccttatttttattacaggtcttccatcgacggactccctaaaaagccagcggcgtggaggggcgccctctattggacaaatagatcttgactactttcggccctcaaatagcctgactaggcaaataacaaataataataatttttttttaaatcatggaaaatattttaaaaaacaattaaaaagttataaatctataaaatctgcttctgtctgtgtgtctgtatatttagatgtctcatgtgtacataatgtttcactaccaaaatatatgatgaaaccctcattaatcggcttagaaaactaaacacctaaatattttctcagaaaatacaaaaactttaactcaaatcccttttaattcacctgactttaaaaatctttaaaaaataaagcatgctttaaaattattagtaaagtaaaattagaacatcttcagaatttagacatttggtttaaattatacaggtcaaatactgcccttagtaaatattttcaggtcataaacaactcctgtaatcttttaaataattgaattacatgtctgttttagagctttaagttctagctaaagcctggggacaaatgaagggcaccatgccccctctctgtgctggaaagagacattttctacagctctgacccttgcagtaggctttgcaactgctacctatcaaaattgcctacatcctaagtttattattaaaaggagttgcttggagttaacattataatgaatatatgtaactaaaactatttctcatacaaagtatatgaaaaagtagaatgtatttttaataaaaagttataaaaagacatgaacatgtagtttttataaaaaacagtaattttgtctagttttgcagttctaaaaagttatgttaaattcaaaaataaaaaataacaagacaagactcaaggtttaaataagttgtaaaagatttgtaaaaattagttctataaaaattttacaaaaaaaagcattggttaaaatttaaggaattattttgtttttacagaaattaaacattcattaaaaacactctgatacaaggccttaatttgggttcatgtatcagaatagcagggttttcttagaatattaatctattctttaaaagaactatgaatgttatgcaaactttataaaaatcttaccttagagtcaaactgattaaaattccatagattttacgtaaaattttattaaaaattaacttcaacaaaaataaaatttgattttctcctttaaacaaaagttttgcgtaatattaaataataaagcatttttgtttaccttttaaactataaacacacacacacatacacatacaccaacactaaagtcagctgacctcatactgtctttattggatattcttgtttaaaaaactatcttctttggaaaataaagttttttattttaaaccatattttaaattatcattttgactaaatccataacatacagtgatctgtaataattctattttataatatcaagtgttttgaagaactccaggaacagccatgagagaacactgtggtttagtaacactttatttcctcagtttgaaaatagttgtctttcttggggaggccggtttcagcagatgaaaacaagagtcatgatgaaaattacccagcagtggttagtgtgaccataggaacattgtcatcaggtcagcagaaaacatatcagcaaatttttctcatactggcagtgtgtaggggtggatgtttacagttcctgaagccccagtggtcgtgtggtcttttagttttgccatttataggcaacttgtggtaactagctcaattagacacattccttatcacaaggacagagggctttctgtatcctagggttcttgccttggcattccagaagaatcaggtcacacgtggacgtggagaatgagtgcaaggttttattgagtggaagtagctctcagcagatgggggagccagaaaggagattggtttctccctggattggggccgttcagcagccctggctctcctctgactgccccaggcaaaatccacatcgttctataagtcggtgccctgctggtgtgctggtgcctgttgtcatgttcctcttcatgtccagccgcctgtgtgttcctccgctgatgtgctcctctcgacgtcaagcctcctgtgtgtctgactgctagggtcttggggtttttataagcacaggatgggtcttagcaggccaggatgatcttgggaaagacaacattcggtcaggaaaacaaaaatgcctgttgtcatctaggtccgtggggacaagcccaggtgtggagcttttagccagggaccacagcctcctgtatccaacacttcccttcaccttttctatatcattcaaagggatcatgcccttcccatcccagcacttcactttcatgtcatttgccccctctgaagaggtacatctaactgccattagaatatggatgatgaccagtcttagctgcttcctgctgaaagggggcattgttttgggggaaaacggcagtcagattcctcccaggggtctctataataaaagatcgaggtggctactttcaggaggtcctctaatgtactatctggtcccaagtcccatttctgcaacctcctcctgatgtcaggagctgcctgagtaataattttatcctttaggattatctgtccctcgattgaattaggagatagagaggtgtgatttaccaaggcctctcttagcctctccaggaaggcagtgggattttcatcaaatccctggttaattatggacaacttagtataattgagaggcttggtcttagacctacgtaagccctctattatgcacacctgaaagtgtctcctcttccagtcttccatctcattattgggatcccatttagggtccttcactggtgctacttctcttccagttggataatattcgctcccttccctgatgctataggtgatgcaaagctcatccccaaatctctctgctgctggcagagcagcctgcttctcagtgtctatcaggttctgactcaaaagtaacataacgtctctccaggagagttcaaatgttagggtgaaattctggaaagcttctatatatctatcagggtcatctgaacacttgcccagatctcccttaatttgctttaagtcttgtagggaaaagaggacttggaccttactgggcccaaattcactgggcatctgtaggaggggcaagagtgagactgggcttgtttgggatgaagatttctaggaggggccaggtgagaggctgaagctggatacggaggttggggtggacccagaggagcagggcttgagggagctggcacgtcagctgggggtgcgtctgggactcgtgtctttaattccctgggcttgaccctggcagccttccccgagacagcaaacaggagggctggaacaatcctacatgtcagcaaaggtctggattgctttgcaaggtatagaaagcctgcacatttggggcctcagaccatgtgtcctcacatccagagaaaagttctaattgcaggatggtattgaaatgaatggtcccttcctgaagccaagccagtccttcctgtaaaccataatttggccaaacctatgtgcggagggctatgagatgcttttcctctggattctgagggtcaaaacagtcccaatggttcaggatacactcaaggggagtacaagctgggggtggtgaggagaactggctgcccattctgaaagacagggaatagaggtgttcctcatttcccttccttcttttggcaaaaagctcagggtgtgatggggagggaaagcaagcatcttcacttcactttccacctcttacccctgcgccctggcaaccttggcaggtgccggccacaggtacaaatgcggtatgtacccatgaagcagggagaacctggagattaggaattaactgccctcacctatgtttccttttctccctgctgttgaaaaactttgagttccctgggcctttttatcccatgaggcatggcctccttctgtgggatggggttcagtcagcaggaattggtcctgtccatttacattgtgcctgttgcctggctttgaattcctcagacctgctttctctttctagggcctcagcctgaagcttggaattgagtttgggactgaaaaagcatttcagaggctgtttatatccatttagtgcctcaaataagccctgctgaatttgcaattatcagccagcaggggtcactcctctgttaacttccctattagaaacagagcggtggggattctcacttagaaaagaaaaaaagagaaaaacagttaaagaggcaaaaagtggggaatgctgggggaagaaccccttgcttagtgcaagtgggcccctctaatccttataactttcccatccttcccccagttcagaccaggttgaattccttggccatggaaggaaaggttccattgatgcagtgggtgagaagcactctgtagggtcctggctaccatcggttttctcacacccccctcatcccaggcagtggagggagacacttctgcgacattgctccccctgccccttcatggctattgggtgtggcctttgcctgctgcaggcatgcctaggtgctggagctgggagggaaaagggtaaggagaggtgccctggaagccgctcatgcctggggctgtcaaggtggaggcatacatggcacctctaggaaaaattggtctgatttgcacctttggcggctgagccaaatgctcattttacttagtaacattgcctcagcctgtagcaaaactcttaacattataaaggaagagataagatccatttcaaataatgtgtgagagagaaaagagatgaaaggaaaacagagtcttttacctgcaggaaagggagagaagtggcagagttttggaagaaaggcaggcccaacagtttcccattcactcacactcaccttccgagatcccagacgagccaccagttgaaatgggaaaagtttccttgtccccctcacaggaggtggagtgggggtgtggcttgcttctttagtactccgctgctcaaacctctagggaagcatacagactggcaagttgtggggctacaaccccatggcagcatctaggggtagatgtttacagctgctgaagccccagtggacatgtggtaccatgtgctcttttagttttgccatctataggtggctttgtggtaaccagctcaattagacccattccttaacccaaagacagagggctttctgtatcccgcggttgttacctaggtgtaccagaaaaatcaaatcacacgtggtcttggagaatgagtgcaaggttttattgagtggaagtagctctcagcagatgggggagccaaaagggagaatagttttcccctgaagtcgggttattcagcggcccaggctctcctctggctgccccagccaaactctatgtcaatccattggtcggtggcctgccagagtgctggtgcctgttggtggattcctctcagcgtcgagagtttttccctctcaggaaagggagagaagtggcagccacccatgtgttcttgcactgatgtgctcctctcgacgtccaacctcctgtgtgtctgcctgctagggtcccagagtttttttaggcacaggatagggcatggtgggccagggtgatcttgggaaatgcaacatttggtcaggaaaacaaaaatgcctgtcctcatctaggtccaggggcacaagcccaggtttggagccctagccagggaccccggcctcctctacccatcactttccttcaccttttctgtatcattcaaagggaccatgcccttcccttcccagcacttctcttctgtatcaataggtgatgtttttaaaatttcccaactctagtgcaggcatggtactagacatatacatagaaataaaaccacacttattcttctggctggcaagacatagtatttttgccaaattatgtgttgttttgaagcattttatgtacccctggtcatataaaaataaagctattttgttcagtacaaacagcagcattttctggattagaaagttaatcatcttaaaagatcatcacggatttttccattgcactcatcactaattgctttggcaaaaaatttcttatctcacgcatgacaaaatcagccgcagtatctcctagtaatttaatggtgatgatctttataaaggaaataagcacatcaagggaaaacataattttttttaaaaaaagagtaataaaactttttaaaagtcttttttaaaagactgcttttctaaaatagtaaaataaaactccaccaataaaaccaccaacaaaacagaaaagaaaaaataatgatatgatcggagctatttgatgaaagatggtaaattaaatttaaaatgattagaagagaaaaagcaatacctgtctcccgtaggtctcagtccaggttctgctatgcctttctcctggtgagccacctatttaagagtcgcttaaagcatatgttaatccaacaacagcagattaaaaaccaatgcaatctgaactatttgatctaaaaacataaataaaatttaaaacaaataaaagagaaaaagcagtacctgtgtcctgtaggtctcagtccaagatctgctctgactcccttgtggtgagttagccctttagaagtcacttggggtggggcatatgttaattccactaacattggttctggccaatgagtcaggaaggtggtaaatggcaccttttcttcttgctgatttctttcagttcctttggagtctggacattagtcctttgtcagatgcctagtttgtgactactgtttcctatactgtgggttgtgtgtttaccctgctgatatttcttctgccttgcagaagattttcggtttcattaggtcctattgatcttattctatttttatatttttgcgtttgcttttggggcattagtcatgactacttggcctaagccaatgtctagaaaagctttttggatgctatcttgtagcatttttagactttcaggtcttagatggaagtttttatatgctttgttaaagatcaggtgactgaaagtaccgggctttgtttctcggttctctattctgttccattgctctatgtgcctatttttatacttcctgcaccatttattgaataaagtgtcctttccccaattagtgtttttgcatactttgttgaagattagttgtctgtaagcatttggctttatttctgggttctctattctgttccattgctctatgtgcctatttttatacttcctgcaccatttattgaataaagtatcctttccccaattaatgtttttgtgtactttgttgaagattagttgtctgtaagcatttggctttatttctgggttctctattctgttctattgctctatgtgcatattttataccagtatcatgctattttggtgattgtagccttgtagtataatttaaagcctgccttcagatttgttctttttgcaaagtattgctttggatatgcggtcacgtttttggttttgtataaattttaggattcttttttctagttctgggaaggagaatgatgatattttgatgagaattctactgctctgtagatggctttggagagtatggtcactttcacaatattgattctacctattcataagcttataatgtgttcccatttgtttgtgtcaactgtgatttctttcagcactattttgtagttttccttgtaggaaacttacattaacctacttggttaagtatatttctaagtattttacttattaaaaattctcagggaaatgcaaagtaaaactgaggtgggaaattaaagaaaaataaaattaaaaagaaagggaaataagctttcttgtattaagctaacttgtcccagaggcagcaacaggcacagcccagacccaggaaaagtcttgataatattatttattgtattctggagactcttccagcactccttcaatgtagggagaagaaaaacaaattttcctttgttttatggtatgagtttatagattcttgttctctttaactagtaacttcaagtattctgttttatctaagaagtatggcaaaggtcatgagaagcctgagcaggcctgaactacagctctctaggcaccatagtgaagataaaccaatgcaagcctctttagagcaaaacctagataatagacatctgggttgcatagcaacagttatgtgcaatcctgagttatgaacctgttacaatttgattaactgtctttttcctgcctctgtatccctgctttcacaccactgtaagcttgcttcaagctggcccacccccttttgtgaagtgtgtataaaagtcaagtgctgtctttgttccaggccctgtctttggacgtgagtctgctgggcctgagagcactcaataaaagattctcctgttttaacccaaagcctctctctcatcctcctaaatcccacaacaaaaccacaatgagatgctatcttaatcttgctagaagcccataatttaaaagtcagaaaacaatagatgttggcatagatgtggtcaaaagggagcactttgacactgctagtgggaatttaaactagtccgaccactatggtaaacagtatggggattccttaaagaactaaaagtagaccattcattccagcaatcccattactggctatctacccaaaggaaaagaagttattccataaaaaagacacaagaatatggatgtttatagcagccgattcgcaattgcagtgatatgggaccaacttaagtgcccatcaacgaacgagtggataaagcaaatgtggtacaccatggaataatacttgataataaaaaggaacaaaataatgtcctttgcaacaagttggatggaactggaagccattattctaagtgaagtaactgaggaatggcaaatcaaatattgaatgttttcacttttaaatgagagttaagctatgagaatgcaaaggcataagaatgatataatggacttggggactcagggggaaaggttgggagggggatgaggaataaatgatgacatattgggtatattatacactgctcaggagacagatgcctcaaaatctcagaaattaccactaaggaacttttatccacataaccaaaaaccacatatattccacacactattgaaagaaacataaacattattttaaaaaataaagccacttttaaaattagcaaaataaaataaatatgtcttcagagtttagatattggatccaaattagacagatcaaatactgcctttactaaatattttcatgtcattaacaacttctaaaacctttcaaacagttttttgacatgtcttggaaccatccatttctagctaaggcctgggcacctgtgaaatagggccatgcccccccttatactgggaagagtaagatatttcaagactaagatgttttctacagctccatctttttctttaagctctacatcaaggacataattaaaattggttgtctcctaagtggtttactaaaaatgcatacttaagagttaccattataattaatatttgtatctaaagctacttaaaaattttcacacacaaatctgactgaacaagtaaaatatattttaagtcaaagtttataaaaggacatgagaacatagcttttatgaaaaaattagttttgtcaagtttagaggttttcaaatattttaaattcaggaaataaaataacaaaaagacaaaagaaaatggttgaacaacttagaaaaggtttgttaaaattcatcttataaaacaatctacatgtaaaaagtgggctaaaatttgaaagagattatttaggttttccataaattaatccagaaggggtaggaagtcttaagaatgaggaaggacaggaggaaggggaggtcatcctgacactgcagaggcagaagtgcagctgaaggtatgaaggctaagaggggaggggagtttgagtgctgctgcctggctgtcagagcagaggagggtcctgggcaccagacttgaggaagggatgaaaatgctgggcagacctgtagtgggcccttgagatggcagatagtggtttccagagagagggccattgttttccagtgcccagcactgagcagagagagttttgggcagtgtaaaaaaaaaaagagaacttacctctttctcgttttagaaaaagaacagtctaagaatatcagcagggaaactctcagtgcttcaaggggttaaacgcccttttggctttcttgtgttggtttcatcatagaggaggagaaacttcttggaagtgttcctaaaaacacaacacgtctgcttctcctttcaaaaaaggaagtgctaaaacacgaacactctagatccaaatattaatacggatgtctaaatgcttccgttttccaaggggcagaaagctaaaggttgtaacctattcatttcagtcaaagttggtgaaagggaagcaaaggaactgggtggggcttggaaggatgacgaagctcaagctcattggccagcaacctctctcctgggggcgggaggggtgagcatacgtcattgctttggcttctataaaatgaggaggactcaccgagtgtgaagagtccttctggtgattgcagctgagagcacactcacgacgttctgcaaggattctctgattatgattctgaagggaaaagcgatggaatggacagcagagattgtaattttctttatcttgaattacggaagaaagtatctaggacagaaatccacgacaagtccttggaaccagcagatctcttcgttcacggagacgttgacgtattctctattgaagaagattcttaccttcttactggacaaggttttgtcagttctgcgtgactggattgtccgggagactctgaggaaactgatgtcacatgtttttccaaagaagatgtttctggaaccaacaactgtgattgtggtttgaggacttctgagagttccagtacaggaaataagcagaacatcagctggaggctaaacggatccagacttcactcttcacttcccttcctattcagtctattgtgcctgctgactgagaagcttggctggtatgtgagcaaataaacggaactattcagaaggagatgttgacatattctgtattgaagaagatccttatcttctcacctgacaaggttttgtcagttctgtgtgactggattgtccggaagactctgaggaaactgatgtcacatgtttttccaaagaagatgtttctggaaccaacaactgtgattgtggtttgaggacgcctgggagttccggtatgcgaaataagcagaacatcagctggcggctgaagggatgcagcctccactcttcacttcccttgccattccatctattgtgtctgcctgactgagaagcttggctggtatgtgaggaaataaacggaattataaacaaggagattgtttctcatctacttcattctgttgtggcttttctattttggggttcagggtgtgtgacaaggaccaaggagatgaaaggtttcatgatggagaaagcccaggcaatcagattgaagagctatccacagggaatcttggctgctgaggggctgcaccctgcaacggactgaccatatgacagaaaagggttttaaaggctcaacttctggactgagaacccagagtaatttgggaacctcctctgtgaggagatatgaaagctgggaatcatgacatccctaggaatggaaggcacatttcctgatggaaggggtgctttggaaaacaggagcagagtagacacagcagccttgtggatacgggtgggcagcatgcatgggtgatgtgaacgtggagtgtttgtgatcgaaactcaaaatgtctgacaaagtgaaaacctagaaaccacaatgaggaggaagagtttgtgagggcaatcactctccccatgtgtgaaaatcgggggctcttaaaatctcatctggagaggtgcagtctaccaaactctgggactttagcctccccttttaaaaaaccgtgcatcaataccaacgtccgaaaccacagaaataacacctggcttgcatggagacaaggacaaaaagccgtcatgatgagttgttctgctcacttgctgcctctgttcagtgcacaggatattgtccacccactagcaggctactgcaagagaagtgtgcaatatgttccctatgtgccatatatgtgccatatggcccatatgacaactgagtcagaaaatatctgatgccctcagagttacactccacctggagcttgcccccagccatccaggacctaggctccctaccctgtccaattttctggtgttttgggggcttcattctctaaggtgtgcccactctttactcaaaccaaaacacccacatattcctgcccatgaacaaccaatcaaccacttctcagttccacatcctgctgttgggtctctagtggtgacactgtaactcccaggtcatagtggtgacactataacacctagctaaattgatgccttgtctctaggaggccatgggctcctgcaggtctcatctgactctctgtagccttccctgacaatgctcacaatacccaagccagagccacattgacagcaagctgctctcatcttacctttgccagacctggccactggaaaaggctgaccctcatcctgcaatgcctatacctccaacctttgtctcaagctggtgtcctggagggacttctaagcagaaaacagattcagactcccatcctctcctgaatggcctcatatccaattctcagaccctcagccttcattgtaaggacacttcatccatgcccttgagtattctgtctgcactgtgtattctgcaatagattctcctccctctgcgaccctcaactccttccgcagactttttgttttcttgatcatctaccatagtcttccactgggacactgccaagcccattctggagagtgagttgtgcaagtacactgccccccatctacctttcgggaggtgtatacacccttctttctcccaggtctggaggctttctattttcatcctgaggcatctccacctgctcttggattcttcaaattgacaaccaccagttaacaagaactatgtgtcaccaaatagccaaacaatggcaattacaaaaataaaattaatagctgtaacccccattagcaaggatacacaaatcaaatcagggatagtgggtgaggaagtctgcctaacattcaaggaaggattctgaagtgatacaaaatcattgcctttgctatctttagaatggacactttcagccaggcacagttgctcagcctgtaatcccagcactctgagagccccagttgggtggatcacttgaggccagcagcttgagaccaccctgggcaatgtgcagaaaccccaactctactaaaaatacaaaaatagccagttattgtggcacatgcctgtaatcccaactccttgggaggctgaggcacaagaatcacttgaatctgggagccagagtttgtaatgagcgaagatcatgccactgcactctagcctaggcattagagtgataatctgtctgtggaaaataaaaacattcctcttcaaagttttcttctttaaatcataaatgttggaattaatatatcctctttgaaactcactttcttcaagcttctttatttgatggtagtaaatctttgttaagctttatgaggcaagagtaatggaagaagcatattatatatatttatactctaacctcagtgcttgttctagcaagctcaggcatgcgtgaatgtgcccaggcatgttccagcccataccttatatcctttccttattgggaaatgctgttactcctataagcattcttgtaagcaacttcctctttttctttgtctccactatctttacctattgaggacagttttaggttcttagccagttggatgtagcatagactgtgaggtccaaccccagccaatggagatagcacacagcagtagcgacctcatgcttaacagataaatattcctgtctccctttgtttggggtgctctcagctgatgagcaacaccctttctaaagaaattaaagttgtcttgctgagaaaacttttggtctaaatgctgattcttccttgcagcactgaagaagaagcaattatttccaacactttctcatacacaaaaaaagaagaaggtggaagaaaactttcttgtgcaccctatccctcactcagaaagacaacagaaggctcctagtggcaagccctagaggattcatttcttttgggaaccctcttggctgggatactaggactcaggtcaaactcagcattttcagtgtgtgggaagtgtgcttgggtttcactgttacttccaataatgtgatttggtccttggggttcaccaaattttggtatggagtggtgaaccctgttaagtttaagtgtctataaaattaacaaagcaaaataaccattctgccccatggttcagagaccaaatattgtgtaggaaatgctttagcgagagaaacagagaagaataaaaaatgtcctcaagcgctgcattatttcttgttatcgtccagatcttagaggaaaggctttcattttccctcattcagtatgatattagctgtgcatctgtcatttatggcttttattatgttggggtatgttccctgtgtatgtagttttttcagggtttttgttatgaagtgatgttgaactttatcaaacgtttttcagtttcagttgaaacgatcatatgctttttgtccttcattctcttgatatgatgcatcatgttgatgatttccatatggtgcactgtccttgcatcctgggcatgaattccacttgatcatgacaaatgaatttttaatgcattcttgaattccgtttgctggtattttgttgaggatttttgcatcaatattcatcagagatattggcctgcagtttctttttttttcttttttctttgttttgttgtttgtttgtttgtttgttttgatgtgtctatgtctggttttggtatctgggtagtagtgttccatccccttttattttttagaataatttgaataagactggtgttggttctttaaatatttggtagaattccgaagtgaagtcattgggccccgggcttttctttagtggaaggctgtttattatggcttcaatctcgttacttattattggtctattcatgttttgaatttgttccttatttaatcttggtaggctgtgtgtatctaggaatttgtccatttcttttagattttcaaatttattggcacataattgcccattgtagcctctaatcgtcatttgagttcctgcagtaccaattataatgtctccttcttcatttttgattgtatttatttggatcctgcccctttttttcttacttaggctgcctaataatttcttaattttgttgaactttttcttttgtttgtctcgctctgccaccaggctggagtgtagtggtgtgatcttggctcactggaacctccgtctcccaggttcaagcaattctcctgcctcaccctcccaaatagctgggactacaggcaagtgccaccactcccagctaatttttgtatttttagtagacacgggttttcaccatgttggccaggatggtctcgatctcttgacttcataatccacctgcctcagcctcccaaagtgctgggattacaggcatgagccactgcgcccagcctaattttgtttaaattttcaagaaatcaacttcttctttcattgatttctgtattttttatttccattttatttatttaaactctaagctttattctatcttcttctcattttagctttggtatgcttattgcctctctagctctttaatgtgcattgttagattgtttatttgaagttcttcctctctacaccataagacgtaagcatgtcctcattatgtcataagatgtaaccacttacagctataaacttccttcttagttctgcttttgctgtatctcataggctttgttatgttgtgtttccattatcaattgtgtcagaaatttttcaatatttttcttaatttcttcattgagcaactgatcatttgggagcatatttttaaacttccatgtacttacatagtttccaaaatacctcttgtgatcaatttctagttttattccactatggttcaagaagatgcttgatattatttcaattttttttcacattttaagatgtgttttgtgacctaacatatggtctactttttttttttattaaactttaagttgtggggtacatgtgtagaccgtgcagttttgttacataggtatacacgtgccatggtggtttgctgctcccattaacctgtcatctacattaggtacttctcataatgctatccctcccctaacctccaccctctgacaggacctggtgtgtgatgttcccctccctgtgtccatgtgatctatttttgagaatgatccatgtggattagaatgctgtggaaaagactttggattcctaatatccagggagggagacgatgatattactttcaatatcacacgggtgtacacactctctgtgacattgttcctaatatccagtggaagagaggatgatataacacccagggagggagaggatgatattactcttaatattgcagggtgtgtacccatgcctatgatattgttcctaatatcaggagggggagaggatgatattactcagaatatggcagggggtgtacacacactctgtgacatggttcttaatatacaggggagaatgggacaatattactctcaatatcgcagggggcgtacaaccctgtgatttgttcctaatatacaaaaggggacagtatgatattgttcctaaaatcgcagaaggtgtacaacgccctgtgatattgttcctaatatccagggcgggagaggatgatattacccccaatatcacagggggtgtgcactttccctgttacattgttcctatgatccgagtggggggaaatgacattagtcccaatatcgcaggatgtgtacactactcccccatgatattgttcctaatatcaagggggagagaggaggatattactcccaatatcgcaagggaggtacatcctccatgcaatattgttcgtaatattcaggaggagagaggaagatattactctcaatatcgcagaaagtggacacccaccctgtgatgttcttcataatatccagggaagcagacgattatatgactttcaatatcgctgggagtgtacatcccttttgggatattgtttctaatatccaggaagggagaggattatattacttccagtattgcagccagtgtacacatttcttgtgatattgttcctaatatccagaaagggaaaggatgatattactcccaatattgcaggtggtgtacacccccctctgatattgttccttacatcaaggaaaagaaagaagaatattactcccaatatcgaagagagtgtacacccctcctgtgatattgtatttaatatccatggggaaagaggatgttgttactcccaatatcgcagggggtttacacccacactgtgatattgttcctaaaatccagtgaaggagaaaataatattgctcccaatattgcagggtgtatacaggccctcccccgttatattgctcctaatatccagcggtggagaggatattactttcaatttttgcagggagtgtgtaccccctctctgatatttttctaatatcaaggatgggaaaggatgccattactcccaatatcgcaggaggtgtacatgccctgtgatattgttcctaatatccagggaggtagaggatgatattactttcaatattgcaggggctgtacaccctctatgatgttgttattaatatttaggttgggagaaaatgatatttttcctaatatcctgggaaggaaaggatgatattactgtaaatattccagggagtgtacaccttcctaatattctaatattgttcctaatatccaggggtgggagaggattatattactcccaatatcgcagtgggtgtacacccctcctgtgatgttgtttctaatatccaagcgaggagaaaatgatatcactctcaataccgcagggggtgtacaccttccccatcatatcgttcctaatattcagagggaaagaagatgatgttactttcaatatcgcaggggttgtacacaacccctgtgatatttctcctaatatccaggaagaaagaggatgatattgctcccattatagcagacggtatacgcctccctgtaacattgtttctaatatcaagactgggagaggatgatatcacttccagtatcgcaaggggtgtacacctcccccgtgatattgttactaatatccagggggaagaggataatattactttcaatattgcaggggctgtacacccccgtgatattgttgttaatatttaggttgggagaaaatgatattagtccaaatatcgcagagagtgtacacacttccgataatattgttcttaatatccatgggggagacgatgatattacacccaatatcgcagggggtgtagtctccccttgtgatattgtccctaatattcagggaagtaaacgatgatgttagtgtgaatattccagggagtgtacaccccctttgtgatattgtcctaatatccgcaggagagaagataatattactcccaatatcgcagggggtgaacacaccccctgtgatattgtttctaatatccaagcgaggagaaaataatattactcccaatgtctcaggggatatacaccttccctatgatattgtttctaatattcaggtggaaaacgggtgatattactcctaatatccaggaagaaaggggattatgttactccccttatagcagggggtatacacctcccctgtaatattgttcctaatatcaaggctgggatatacgtggggggaaggatgatattactcccaatatcacaggggttataaaaccttctgtgatattgctcctaataaccatggcggaagaagatgatattactcctaatattgcaggaggtgtacactcccccattatgttgttcctagtatgcagaaaaggagaggatgacattattgccaatatcgcagggtgtgtacaccacccatgatattgttcctaatatttagagggacagaggatgatattactcccaatatcgcagggggtgtacacgcatcccctgtgatattgttcttgaaatcgaggggaaagagaattatatttctctaaatattgcagagggtgtacaccgccccctgtgatattgttcctaatagccgggggcggggggagataattaaattactttcaatatctcagagagtgtacatcccccttgtgacattgttcctaatatccagagcaaaagagaatgatattcctcccagtatcgcaggaagtgtacatttaacctgtaatattgtttctaatatccagggggaagagaatagtaatactcccaatatcgtaggggttgtacaccttttctgtgatattgttgcaaatatttagaagagagagagaatattactcgcaatatcacagggaatgtatacttcccctgtgatattgttctaatatctagaaaaagagaggataatattactcctaatattgcagggggtgtacacccccacttgtgatattgttcctaatataaaggaaggtcgaaaaacaaacggggagcccagggggaaggaaggcaggcgaggaagaggcagcgccggggcgccggagggagcagccgggccgcggaagcgcgagcacgagaccggtcgcggtcgcagtcgcatttttgccgttgtcgcggccgccgccgccgaggcttacccggggatgtctgagcccgcgcctcgcggcccccaagctccacgctgcgcccgctgtcccggcctctaagggccgccacgtccctgcggcgcgcgcaggcagaaagcggcttcgtgccggcggagggggcccgggcgggccgggaaaggctgccccaggccccgcgcctaccccatcaccgcggccggcgccgggccgggaggatgagcggtgtggggctctgaagcatggagggggttttgtacaagtggaccaactatctcacaggttggcagcctcgttggtttgttttagataatggaatcttatcctattatgattcacaagatgatgtttgcaaagggagcaaaggaagcataaagatggcagtttgtgaaattaaaggtgacagctttggaggggaccacccttgattggatacataaattctgttcattcagcagacaacacaagaatggaattaatcattcctggagagcagcatttctacatgaaggcagtgaacgcagctgaaagacagaggtggctggtcgctctggggagctccaaagcatgtttgactgatacaaggactaaaaacgaaaaagaaagaagtgaaaccagtgaatcgctgaaaaccaaaatgtctgaacttcgcctctactgtgacctcttaatgcagcaagttcatacgatacaggaatttgttcaccacgatgagaatcattcatctcctagtgcagagaacatcaatgaagcctcttctctgcttagtgccacgtgtaacacgttcatcacaacgcttgaggaatgtgtgaagatagccaatgccaggtttaaacctgagatgtttcaacggcaccatccggatcccttagtttctcctgtgtcaccttctcctgttcaaatgaggaagcgttctgtcagccaccctggttcttgcaccagggaggagtagccactgtataaaagaaccagtatctgcacttcaccgactctcccagcgacgccgaagaacctactcagatacagattcttgtagtgatattcctcttgaagacccagatagacctgttcactgttcaaaaaatacacttaatggagatttggcatcagcaaccattcctgaagaaagcagacttatggccaaaaaacaatctgaatcagaagatactcttccatccttctcttcctgaagaaactgtagtgtccaactttctctaagtattgctatgcaaaagctgctgtaattgaactattgttatagggagtagttttttcccttaggactctgcactttatagaatattgtaaaacagacaaacaagaaaacaaaccacatacttttgaagcgtgttttatctttatatagtttgtttgcaagagtattttcctaataacttcacagtatgaatgtgcatcttttttttctttttttaacaaatgatggtgtaacattttgacatccataaggacaaatgtagatatttttctaaaaaaccgtgaggggactgacagcttggtcagggtgtattgtagcttataaacatgaaatcttacaaggtttcagtttgacagaagtgtgatatatgtaacttgtgccatggaccaaatggtcactttaccacagctaaaaatgagttatgatagcagcttgatggtgattgcattgtattcctttaatcaaaaaggaaacgcaatattctaagtatctttagcccaaataccatgacatattgagcatctttaaataaccagactgtattgtccttcatatgtgaagttgacactactgatttgtcaataccaaattttgggttaaagtgtttaatttttatttatttattttcttgttgcctcaaaagatgattgcattctaacttttgtgacctaccaaatttaagatgtgtatacattgttctttacgttgttctagaaaagagattttaatgctgtagtgacttagctcacttacatcagagaaataaacaactttcaatggaaaaaaatatatataaaggaaggaagaggatgatattacttctcatatagaaggggttgtacaccccccttgtgatattgttcctaatattcagggagggagaggattatattactcccaatatagcagggagtgtacacccccccccccgtgataatgttcctaatattcagggaagcagaggatgatattactttcaatatcacagggggtgtgctgtccccctgttatattgttcttaatattcaggggggagaggatattattatgcccgatatcacaggagaagtacaccccacaagtgatattgttcctaatatccaggggtaaagaggatgatatcgcaggtggtgtacacccctccccgtgatattgtttctaatataaagaaggagagagcatgatattactcccaatatcgctggaggtctacaccccccttgtgatactgttcctaatatccaggaagggaaacaatgatattgctgtgaatattccagggggtgtacacccctttgtaatattgttcctcatatccagggggtagagaggatgatattactcccaatatcgcagggggtgcacggccccactgtgatattgtttttcatatccaggaggggagaggatgacattactctcaatatggcagggggcgaacaccccctgtgatattgtgctagttaggttgggagaaaatgatattactcccaatatcgcagggggtgtacaccgctcctgtgatattgttcctaatatccatgacgggagaggatattactcccaatatcgcagggggtgtacctctcccctgtgggattgttcacagtatccaaaagggaagaggatgatgttactcccaatatcacagggagtgtacaccaccattgtgatattgttcctaatagccagggaagaaaacgatgatattattgtgaatattacagggggtgtacacaccccctgtgatatggtttttaatatacaggttggaaaaggatgatattactcccaatatcacaaaaggtgtacacacccccccatgatattgttcttaatacttcggtggggagaaaatgatattagtctccatatcacaggggtgtgaactcctccggtgatattgtttttaatatcaagaggggaggagatgatattgctttcaatatcgctgggggtgtacatccctcctgtgatattgttccttatatccaggcgaggggaaaataatattactcccaatagtacacaccccatgtggtattgttcctaatactcagggggaaagaagataatattactttcaatatcacagggtttgtacacctttcctgtggtatagttttcaatatccagggggaaggtacatgatattactcccattgcagcaaggggtgtacacacctcctgtgatattgttcctaatatccagaagtggtgaggatgatattactcccagggggtgtacaccccacctatgatattgtttctaatatccaggggaaaagagtgtgatattatgcccaatatcgcagagggtgtacacttatcctgggatattgtttctagtatttggggagggaggagaggatgctattattctcaatatcgcagaaattgtacacccccgctgtgatattcttcataataatcagggaaaaagaggatgatattactaccaatattgcagggggttacacttcccctttggtagtgttcctaatatccaggaagaaagaggatgatattaatcccattttccaggaagtgtacacccaccgtgtcatgttgttcctaatatccagcagggaagaggatgatattactcccaatatcggagagggtgtacacttcccctgttatattgtttctaatacccagggggaagaaggatgacattactgccaatatcacagggtgtgtaccccaccctgctattgttcctaatattcaaaaggaaagatgaaaatattactcccaatatctcagggtgtgtacacctctcctgtgatatcgttcctaatatccacaggaagagagaatattactctcaatattgcaggggggtgtacacccccctgtgatattgttccaaatattcgggcggggagaggatgatattagtcccaatatcgcagggggtgtgcaccaacctgtgatattgttcctaatatccatgcgggggaggacgatatcactctcaatgtcgcaggaagtgtacacctctcttgttatatttttcttaatatccaggagggaaaagatgatattactgccaatatcgcagggtgtgtccaccccccttttatattgttcctaatatccaatggaaaagaggatgacattgctctccatatcccagaaggtgtacaacgcccctgtaatattgttcctaatattttgggggaagagaggatgatataacttataatatcacaggaggtgtacaccacccctatgtattgttcctaatatcctttaagggagaggatgatattactcccaatatctcaggtggtgcctattccccctgtgatattgtttttaatatccaggggaagagagtatgatattacgcccaatatcgcagggggcatacaccctctctgagatattgttcataatatatagagggagagaggatgatattacttccaatatcagaggtggggtacaccccccggttatattattcttgatatccaggaggggagaggttgatattactggatatatagcagggagtgttcacatcttctgtgatactgttcctaatatccagaaaagtagaggatgatattactcccaatatcgcagaacgtgtacacctccctgtgatattgatcctaacattcaaaggggagaggatgatattactcaaaacatcacagggcatgtacactcccctgtgatattgttcctagtatccagaagggagcaagataatattactttcaatatcgcagggggtgtacacccctctttggtatgtttcctaatatccagaaggaaagagggtgctattactttccatattgcaaggggtgtacacccccctgtggtatggttcataatatccagggagggaaagggtgctattattccccatatcgcgaggcatgtacaccctgctgcggtacggttcctaatatccagggggaaagaggatgctattacttcccatatcgcggggtgtgtacacccccgtgtggtatgttttgtaatctccgggaacgaagagggtgttattacccctcatatcgctggaaatgtacactcccctgtggtacggttcacaatatccaggggattgagggtgctattactccccatatcgcggggggagtgcacctccctgtggtatggttcgaaatatccagggtaagagagggtgctattattccccattttgcaggaggcgtacacccctctatggtatgttttgtaatatcccaggtaaggggtgctattgagagaagagagcaaaagaccccccccatattgttctgtattattttatactcagtacctgttttaagaagaaacaaggaagcgaaaccaaaggcaggcagcccggcgccaggcaccagatccaaaaccagacccgaaaccaggcctgggccttcctgaccttagcctgaaagttaaaattcaacccatgacctagcaactgatgttatccatagattccagacattgtatggaaggacattgtgaaatttcttgttctgttctgtttcactctgagtactggtgcatgcagcccttgtcacatacccactagattgctcaatcaatcatggccctttcatgtaaaaaccttagtgttgtgagcccttaaaaaggacagaaattgtgcactcaacaagcttggattttgatactctagtctgctgatgcttccagctgattaaaagccacttccttcactacctcggtgtctgtgggattttgtccgcggctcctcctgctacactgtgactccccttatagagaggggtgtacacccccctttggttcctaatatccagcgggggagtaggtgctattactccccatattgcggggagtgtacacccccttgtagtacggatcgtaaaatcaaggagggagagaaggtgtaattatccccatatcacagggagtgtacacccctttgtggtatagtttgtaatatccacgacgggagagaatgctattactccccatatcgtggagggtgtacaccgccctgtagtatggttcgtaatatccggaaggggagaggttgctattactccccatatggtgggaagtgtacacccccatgtgatatggttcataatatccaggggggtagaggatgatattacccacaatatcatagaaggtgcacacccttttgtgatattgtccataaaatccagaaggggagaggatgatattacttccaatatcacagggggtgtgtagccccatatgatattgtttgtaatatcaaggtagggagaggatgctattccttacaatagctcaaggggtgtaaccttcttgtgatattgtttgtaatatccagaaggggagaagataatttttttattttaaaagtaaactttaatgtcaaaaatgcaaacttgagaagggcagaaagatcaaacagaaggctgccacttcacaattggagggttgcacagtggccgggcagaggcgctcctcactccccagacggtgaggcagccgggcagaggtgctcctcacttccgagatgttgcaggagccgggcagaggtgctcctcacttcccagaacagggggctgccgggcagaggtgctcctcactgcccagacggtttgcaggcctggcagaggcactcctcacttcccaaacggagcagcggcaagccagaggcgctccacacttcccagatggtggggcagccgggcagaggcgatcctcacttctcagagggtagggcggcccagcagaggcgctcctcacttcccacatggtggggcggcaggctagaggcgatcctcacttcccagacggtggtgtggccatgcagaggtgctcctcacttcccagatggtgtggccgccgagctgaggcactcctcacttccctgacagtggggcggctgggcagaggcgctcctcacttcccagacacttggactccgggcagagactctcctcatttcccagatggtggggctgccgggcagaggcgctcctcacttcccagacggttcagaggccgggcagaggcgctctggggagaggataatgttactcccaatatcgcagggggtgcacactccctgtgatattgttccgaatatccagagggggaaaggatgatatagctcccaaaatcgtggggagtgtacacccccctgtgatcttgtttgtaataccaagaagaaaagagaatgctattatttccaatatagcagggggagtacaaccccctgtgatattgttcgtaatatctagggggagagaaaattatattagtcttaatatctcaggggacgttcatccccctgtaatattgttggtaatattcagaatggagaagatgatattgttcttaaaatacaggaaaaaatatgataatattacttccaatatcgaagggggtgtacactctcctgtgatattgttcccaatatccagaatgaaagaggatgctattactcccaatatcccagggagtgtacacccctttgccatattgttcataatatccaggggaagacaggataacattactcccaatatcaccgggggtgtccacccactagtgatatttattgttcatcatatccagaaaaggagaggatgatattactcccaatattgcaggtggtgtacggtccctgtgatattctttgaaatatctagaaaaggagaggatgatatcactccgagtatcacagggggtgtacacccccctgtgatattgttcgtaatatccaggggagaaaaggatgatataattgccaatatttcaggggatgtgcacctccctgtgatattgtttgtaatatccaggggtggagaggatgatattactcaaaataacgtaaacatcctgtgtgtacatcccctgtgatattgtttataatatccaggggggtagaagatgacattacccccaatatcacagagtgtacacacccctgggatactgttcataatatccaggcgggaaagaatgaactacttccaatatcgcaggatatgtacacccccctgtgatatatttcctaatatttatgtgggtaaggatattacccccaatatcacagaaggtgtacatcctctttgtgatattattcctaacatccaggaaaggagagaatgatattactcccagtatcgcagggggtgtacaccacccctgtgatattgttgctaatatccagggggagaggataatattactcccaaaatcacaggggacgtacactcctcctgagatattgttcctaatattcatggggaaaagaatgctactactccaaatacagcagagggtgtacaccatccccgtgatattgttttttatatccaaagggtgaaaggctgatattactcccaatatcgcagggggtgtacaggccccccatgatatcattcttaatatccagggaggcaaagaatgatgttactcccaatattgcaggctgtatacaccccccgtgatattgttcctaatatccagagtaagagaggatgacattgctcccaatattgcaggggttgcacgcacgccctgtgataatattactcccaatatcaacagtgggtgtacactcctcctgtgatattgtttgttatatctaagaaagaagaggatgatattactgtcaatatcacagaaggtgtacagccccttgtgatgttgtttctaatatccagcggtgagaggatggtattactcgcaatattgtagggggtgtccaacggccctgtgatattgtttctcatattcaaaaaggaaaagaataatataactccaaatatcgcagggtgtgtacacttccctgtgatattgatcctaatatccaggaagagagaggatgatattaatcccaatatcacagggggtgtacatcgcttctgtgatattcttcctaatatccagggggggaggggatgctattactcttaaaatcgcagggaacttacactcccactatgatatttttcctaatatccaggaagggagaaaatgatattactcctaatatcacatatcacaatgggtgtacatctccccgtgatattgtttctaatatcaaggatgggagaaaattatattactctcaatatcgcagggggtgtgcacacctcctgtgatattgttcctagtatccagcggaggagatgatattactttaaatattgtagaaggtgtacaacccccctttgatattgttcctaatatccagggggaaaggagatgatattactcctaatatcgcaggggctgtacaaccctatgtgatattgtttcttctaatatccaggggtggagaagataatattactcctaaaatcgaaggggacatacactccccctgtgatatttttcctaatatccagaaggaaagaggatgatattactcctaatattacaagaaatgtatacctgtcctgtgatattgttcctaatatccagaggggtaaatgattatattactcccaatatcgcaggggtgtacaccttccctgagatattgtttctaatatgcagtggaggagaggatggtattactcccaacatcacaggagatgtaaactccccttgtgatattcttcctaatgttcaggacgaaggagggtaatattactcactgtattgcagcagggggtgtagagccccctgtgatattgtttttaatattcaaggttggagaaaataatattccttccaatatcgcatggggtgtacacccttctttttatatagtttctaatatctggggggagaggatgatattactcccaatatcgcagggggattacacccccactgtgatattgtttttaatatccagggtgggagaggataatattactccaaatatcccagggctatacaccctccgtgtgatattgtttctaatatccagaggaagagaagatgatattactcccaatgtcacagggtgtgtacaggccttctttgatattgttcttaatatccatgagggagaggatgatattactcccaatatcgcaaagactgtacaccctttctgtgatattgcttccaatatccagggagggagaggatattacactcaggatcacagggggtgtacaccccaacctgtgatattgtttctaatatctagggaaaatgagggtgatattactatcaatatcacaggaggtgtacactcccttatgatattgttcctaatatccaggagaatgacaggataatattactcccaatatcgcgggtggtgtctccccccactccgtgatattgttcctaatacccagagggggagagaatcatattactcccaatatcgcaggggatgtacacctacatccggcggagtagaagataatattactcacaatatcgcaagaagtgttcaccttccctgttatattgttgctaatatccagggagtgagaagatgatattactttcaatactgagcgtgtacactacccctgtgatattgtttctcatatccagtagaggagaaaatcatgttactcccaatattgcaggggtgaacacctcctttgtgatatttttcctaatatcaggaaagggagagtatgatattacccttaatattgacaggggtgtacacccccctttgatattgttccaatatccaggggggcagaggataatattattcccaatatcgcagagggtgtacaccccccgtgatattgttcctaatatccagagaaataaaaaatagtattatttccaatatcacagggcgtacattttccctgtaattttgttcctaatatctggggggtggggtggcaggataatattactctcaatattggagagggtgtacacccccctgtgatattgttcctaatattcagggtgggagagaatgatgttactcccaatatctcaggagtcgtatacacccccttgtgatattttttctaatatccaggaggcagaggatgatattgctcccaatatcgcagggggtatacacccgagctgtgatattgtttctaatatgcaatatgggggaaggatgattttactttcaatatcgcagggaatgtacactttccttgtgattttgttcctaatatccaggggtggagaagatgctattactatattactcctcatatcgcaggcggtgtacaactccctgtgatatggttcagaatatccagagtgaaaaaggagggtgacattactcccaatatcgggggggtgtacacccctttgtgatgtggttggtaatatccaggggggcagatgagggtgatatcactccccatatcgtggaaggcgtccacttttttgtgatgtggttctttatatcccgaggggagaaggtgatattactccccatatcgcgaagggcatacacccccctgtgatatagctcataatattccggagagtggaggaagatactatgccctatatcgcgggtggcctacaaccccctatggtttggcttataatatccaggggggagagggtaatattgctccccatattgtggagacgtacagccccctgtgatatggtttgtaatatctttggggggcgagggtgatattactccccatatcgcggggagcatacacccccgtgatctggttcatagtatctcaaaggaagaagttgatgtgtacaacttaagggaaaaagttgaagtgaagtgtacacacgccctgtgacgtggttcataatatccaggcgggggagaggagagtgatatttactccccatatcgcgggtgttgtaaactcccctgtgatatagttcataatatccaggggagagaggagggtgatattgctcctcatatcgcgaagggtgtacaaccccctgtgatatggttcataatatccagaagggtagaggacgatgatattactccacatatcttgggaggtgtgatatggttcgtaatatccagcgatgagagaatgatattactccccatatcgcaaaaggtgtgatagggtttgtaatatcctgagggggagagggtgatattaatccctatattgcagaaggactacaccctcccatgacatggtttgtaatatcccagggggtagagtgtgatattactttccatatcacagggggtgtgatatgattcgtaatattcgaagggggagagggtgacactactctccatatcacggggtgtgtgatatggttcttaatatcccaggggttagaggttgatattaccccctttttggggggtgtgtacaccccctgtgatatggttcgtaatatcccgggggagacagggtgacattattccccatatcgaggggatcgtacaccccctgtggtgtggttcataatatccctagggggagatggtgatattactccccatatcagggggcgtgcactcttctgtggtataattagtaatatccagggggcagaggtcgatattcgtttccatatcatgaagggagtacacttccctgtgatatggttcctaatatccaggggggagagggtgatattattccccatattgcggggggacatacaacccctgtgatatggttcataataaccagaaaagaagagggtgatattaatccccgtattgcagagggcatacaccccccctgtgatatggtttgtaatatctaggggaggaaaaggtgatattactttccatattgctgggtgcagacacccctttatgatatggttcataatatccaagttggagagggtgatattacttcccatatcatgggaggtatacccttccctgtgatatggttcgtaatatccagaaggggagagattgatattactccccatattgtggggggcgtacaccttcctgtgatacggtttgtaatatctaggggatatagtgggtgatattactcaccatatcacgggggttgtaacatggtttgtaatatccaggggaggagagggtaatgttactccccatatctcggggcatgtacaccctcctgtgacatggttcgtaatatccaggtcgggagagggtgatattactcctcatattgccgggggtgtgttatggttcataatatcctggggaaggaggctgctatcactctccacatcttgggggatgtacactctcctgtgatatggttcataatatccagggtgggtgagggtaatattactccccatatcgcgggaagtgtacatacccctgtaatattgtttgtaatagaagagagggtgatattactccccacatcgcgggtggtgcccacccccctgtgatatggtttggaatatccagggggatgaggagggtgatattactccccatatctcggtgggagtacatccctctttgatcaagttcataatatccaaaaggaaacaggagagtgatattactccccatatcgccgggggtgtacacgggagggggagtacacccccggcgatatggtctgtaatatccagggaaggagaggagggtgatattactcaccatatcgcaggtggtctacatttacctgtgaaacagtttgtaatatccagggggggaaatgagaatgattttttttttttgagtctcactgtgtcacccaggttggagtgcagtggcacgatcttggctcactgcaacccccgcctcctggactcaagcaattctcctctcccagcctcctgaatagctgggactacaggcgcaccccacaacgtctggctaatttttgtatttttattagagacggggtttcaccatattggccaggctgatctcgaactcctgaccctgtgatccatccgcctcggcctccaaaagtgctgagattacagatgtgagccaccacgcatggcccaaggagaacgatattactccccatatcccagggggtgtatatccccctgtgatatggttcagaatatccggaaggaaagacagggatattacttcccatatcgcaaggggtgtgacatggttcgtaatatcccatgggggagagggtaatattactcttcgtattgtgaagggcatacactcccctgtgatacagttcataatattccggggagtagaggaagatattatgctccatatcgcgggtggcataagccccctgtggtttggttcataatatccagggaggagagggtaatattactccccatattgtggggacgtacaccctcctgtgatatggtttgtaatatcccagaggggagagagtgatattactccccatattgcagggacatacacccccctgtgatatggttcaaaatgtcttttttttttgaaggactggttctttatttcaaaaagacacttgtcaatattcattatcaaaacagttgcactattgatttctctttctcccaatcggccccaagtagaccacatcaaaggagagtacatattaagccaataagctgtaggatgtacacctaacagacctcctagaaaccttaccagaaaatggggacagggtagggaaagaaactttaaaagatcaacaaactgccagcccacggactgcaggggctgtcacagccagatggggtggccagggtgccacaaacccaaagaagcaaagtttcaaaataatataaaatttaaaaagttttgtacataagctattcaagatttctccagcactgactgatacaaagcacaatgagatggcacttgtagagacagcagcttcaaactcagaaaagggtaatgagatgagtttcacatggctaaatcagtggcaaaaacacaatcttctttctttctttctttctttcaaggaggcaagaaaagcaattaagtgctcacctcaacataaggggaacatgatccattctgtaagcagttgggagggggtagagatggaacaaaattttggtctcagaggtcttgccatcttaatttggtcacttctaatgaaaaaaataaaaaatagaaataacattatccaaaggtatcttaaagctgaaaacttgaacagcacattttttgttgttgttgtttggctaactcctcctggaaccacctttctggcttagctagtactttgtacagagcaatgaggcttcccatagtggagtctccctgggctctgtttggctctcagcaaggcaggcctataccttttcctctcctccatggagagaggaatatgcattaaggtgaaaaatcaccttccaaaagtgagaaagggattcgatcgctgcttcagggctgtggtattatatggaatgttttacaaaaggttgctacaaaacaacaaaagaggtaattacaaaatgtgtacatcacaacatactttttaaagacattatgcattgtgctcacattcccttaaatgttgtttccaaaggtgctcagcctctagcccagctggaatctccgggaagaggcggacagtttggtgaaaaagacacagggaaggagcgggcggcggaaggagggggcggcgaaaggagaaagcagccttccagttaaagatcagccctcaattaaaggtcagcttcgggcaggctggcctcaggcggagtctggttcagagggaggagcagcagcagggtgagactgaggcgttctacatctcattcaggtcaagcagagtctggtccagcatcctttgtgtacagaggtgctcccctttggtgcatttcagtttatcttccaagtcatcaattgtcttttccagcttggctaccgatctctcagcaaactcagcatgggtctccgcctcctttattttatcagtaagaatcttgatctcttcctcatatttgtcttctttttgagagtacttttcttcagcagcactcagacacttcaggttctggtccatcagtctaatctgctcatccatctctcggcaaagggattctgccagctcagctcgttcctctgtgcgttccaagtctccttcaatgatcaccaacttacgagccacctcttcatacttcctatctgcctcttctgcaatgtgcttagcttctctgagttggatttcctggagttccatcttttcttcatcttttaaggcccggttttcaataaccttcttacctctctcactctcatcagcagctttttccgcttcttccagcttttgcagggcagtagccaggtgctcctgagcacggtccagctcctcttcaaccagctggatcccacgttcaaggaggccacctcagcctcagcctgttcccgggcccacctttctccctcaacttctcgctggaggcgctcagctcgctcctctgcatcatctgcctgctgctgcagaacctggatcttgcgcttcaccgcctcgatggtggtgatcccagccatggtgcccacccagctactgctagagctccggttcctgcctcctccgatcggcgttgcagcctcctctcacccttacttccgcctcggttcaaaatatcttaagggaaggagttgatattactccccacatcacgggaagtttacatcccctggtgatatggtttgtaatatcccagggtggatagggtgatattactctccatatcgcgaaggagtactcccccctgtgatatggttcataatatccttggggggagagtgtgatattactccccatatcgcgagggccatatactcctttgtgacatggttcgaaatatcccggtgggggagggggtagagggtaatattactccccatacagcgaagagcatacgcccttctgtggcaaggttagtaatacttcagggaaaagagtgcaatattacttttcatattgcagggaacatacactcccctgtgacatggttcgtaatatcccgggggctgagagggtgatatttctccccatatcaccgggggcctacacctgggtgtgatatggctcataatatacagggagggagagggtgatattactccacataccgagtgaggggttacacaccctcgtgacatgttcgaaataccccaaggaggagacaatgatattactttccctgtcgcgggggctacaccctcccagtgatatggttcacaatatcccggggtggagagggtgatattactccctatatcaccggggggtgtacacttccctgggaaatggtttacagtatccccggggggagagggtactattactccccatatcacgttacatatcagggtacacccccacgtgatatggtttgtaacatcccaggaggaagaaaatgatattactccccatatcgcggtggcatacacccctccccgttaaatggttcataatatcttggggtggagagggtgatattactccccatatcacgtggggcatacaccccactatgatatggttcataatatcccggaggggagagggagatattactctccatgtcgcggggggcatatacacccctgtgatatggtttgtgatatcccgggggcggagagggagatattactctccatatcgtggggtcgtacacttttctgtgatatgattcgtaatatccagacggggagagggtgatattacttcccatattgcgggggcgtacacccctctgtgatatggttcataatatcccgaagaaaagagggtgatattactcctcatatcgcggggaacacacaccaccctgtgatatggtttgtaatattcagcgggggagagagtaatattactccctgtatctcggatggcgtacactcccctgtgatatggttcataatatccagaagaaaagagggtgatattactccccatattccagggaatgtacaccaccctttgaatatggttcgtaatatccaggaggggagagggtaatattgctcccaatatcgaaggaggtgttatacggttagtaatatccagagaaggagagggtgacattactccccacatcgtggtgggtgtgcacccacctgtgatatggttcataatattcaggttaagagaggtgatattgctttccatatcgccaagggtgtacactcccgtgaaatacagttcgtaatatccaaaaggggagagggtgatattactcccatatcgtggggggtgtacacccctctgtgatatggttcataatatccagggtggaataaggtggtattactccctgtatctcggggcatgtacatcgcctgtgatatgattcataatatccagaagaagagagggtgatattaatctccatattgctgggggtgtacaaccccctgttgtatggtttgttacactgagttggggagagggttacattactctcaatatcgagtggggcatacacacttatgtgatatggttcataatatcccagggaggagagggtgatattactccccatatcgcgggaggcatacaccccaatgtgatatggtttgtaatatctacatttttttttttgagacgaagtctcgctcttgtcccccaggctggagtatgatggccggatctcggctcactgcaacctcagcctcccgggttcaagcgattctcctgccttggtcccccaagaagttgggattacaggcgcacaccaccacgcccggctactttttgtatttttagtagagaaggggtttcaccatgttggccaggctggtctagaactcctgacctcagatgatccacctgcctcggcctcccaaagtgctgggattacaggcgtgagccactgcacctggcctggtttgtaatatctatgaagggggaaggtgatattactttccatatcacgggaggcgtacaccacgatgtgatatggtttgtaatatccagggggtatactgggtgatattactccccatatcgcggggagtgtatacccttttgtgatatggttcctaatattaagctgaggagaaggtaatattactccccatatcgcaggggtttttatatggttcataatattcaggaagagagagggtgacattactctccatatcacggggtgtgtactcccccatgtgatatggtttgtaatatccagggaaggagaggttaatattactccccatatcgcagggggtgtacacctctctgtggtttgtaatatccaaagggaagaggatgatattatcttcaatatcttggggggatacagtccccagtgatattgttcataatatccagagggggaggggatgatattactcccaatattgcaggtggtgtacaaccccctgtgatattctttataatatagagggggatgatgatattactcccaatatagtaaacaacctgtgtgtacaccccctgtgatattgtttataatatccaagggtggaaaggatgatattactcctcatatcgcagggggtgtatacccctctgtgacattgttcctaatattcaggggaggagaagatgatactactcctcatatcacaggggatgtacacccccctgtgatacttttggtaatatccaggggaggagaaaattatattattccccatgtcacagagggtgtacaccccgctgtgatagtgttcataatatccaggtgaaaagaggatgatattactccgaatatctcaggaagtgtacacccttctgtgatattgttcataatatccaaaggtggagaggaggatactactccccatatcgcagtgggtgtacacccccctgtgatatggttcataatatccaatgtaggagaggatgatattactttccatatcgcggagagtgtacatccccctgttatattgtttgtaatattcagggagaaagaggatactactactccccatatcacacggggtgtatattcccctgtgatatggttcctgatatccaagagatattataatcctctcttggattatgctacctctcatatcgcatggggtgtacacacactttgtgatatcgtttgtcatatccaaggagggagaggattatattaatcccaagatcacggggggtgtacaccctcctgtgatattgtttgtaatattaaggggggagaggataatattactcccaatataattaacaccctgtgtgtactcctccttgtaatattgttcataatatccaatgggggagacgatgatattactttcaatatcgcagaggatgtacatccctttgtaacaatgtttgtaatataaaaggcaagagaggatgatactacttccaaaattgcaggacatgtacaccccccggtgatattgttcctaatatccagtggggaagaggatgatagtagtcccaatatcgcaaagggtgtacacaccccctgggatattgttcctaatataaaaggaggagaggatgctattattcccaatatcacagaaggtgtaaaatcccctgtgatattgttcgtaatattcaggaggggagaggattatattactcccaatatcacagggtgtgtacacagggaggggcaagggccagaagcgggcgggaatccccatgtttgggcggacccagtttctaatggccagcatttgccaatcaaagcttaccagagaactctaaaagccagggctttcctgctagacaagactcatttctggaactgctttaaaaagaaacaaaacttcccaaggaccccttttcctctctgtctgcctaaaataatgttttaaaaactcctaaagcagctgaattcagcccccttcctgggggaatgtatagacggaactcccacctttcccggcatcccaaggccagagtatgtgaaactcctgggtctctatgtgtgtctgagcggctgctctgccaacactccacacagccctgtgtcctggacccaaggcccttatgacctgagctcaagaggggatctcctgatccatgggttgcaaagatccatgggagaagcatggtttctggggcggggtcacacgctcagtcactgtttccctcggatgccggagatggttcctttggctctctgccaatacagggtgaatcatcatccatccctcttttctttgttctcccgggtcaagttgtttgcctagtcagtcccaatgtgagaacctgaatatttcagttgacgcgctgacttcaaaatccccgggcttcgggaggcggagcttgcagtgagccgagatcccgccactgcactccagcctgggcgacagagcgagactccgtctcaaaaaaaaaaaaaaaaaaaaaaaaaaaaaagtccccgggcttttcttttcactcagtggaaggcagctgcttctaattggccatcttggcccgcccccaccacgtgaccttctgtaaaatgcctccactctccaggaacgctctcattatataactttgcctgaaaccaacagcacgctcattgcacatatcatgggctcatttatttcacttataaagaacctggccaaggaagagatagtgcctaaagtggccagtattctgaccgatatgttagaaaaatggtgtgccgaccaattcatgacatgtgtcccaaaactagcaacggaaattgtattcgccgtgttgaggtctctaatccagatgatgctcatctatgtactggaaaaggcagagtcctttcctgacaagctgctgaaactcttcagaaacatctcatatttcctgaagaagatgatgtctggacaagcagcacaggtcgttcagatttaactttctattcatatatccagcacgatattcgcacaattgtcacgaaaccttaccagttgatgagtcctgcacatttcctttaatttcaggaggaagagggtaatccggatgagttttctgacctactctgctgctgtgattaaacaaccaccaggaaattttgacgacactgttctcctgagctcctccctttcctccgggaacaaaacaattgaatttacaaaaataaagtgttatttgactggagtgaggtctcatgtctgcttatgcggtggctcgctgctcagaacagggtgagtctctgggttgtgtgctgaggaggggaggctctcaatctggagaaaacccactgcaggggacacctccatggggtctgagggactgaggatgaggagccggactgggtctagggaaggaggaggtttcagagggtgaaattctggcactaaagcctgggggtgtttgggaacttcctccttccgaagaagtttcagggagggataaagacaaaccctgggctccttgaggggcccttactaatttgagaggactctatcgggaaggagagtgacaatggcctccttgaggactgaggcccctgaataaatgaggcccagatacagtccatgggggatgagaccttcaagggtcacattttggttgggacagaggaaaagtgcagctctgcagccgcagaggaaaacccggcagtgtgaaagcgaccttggaggggccctgtgcgctctgaatgcgtctgagcccccatcccctgtccccgcctctctttctggattcttccagctcggctgtctccgccatcttctgagcgctccaccctgacttattcaagtttcccttctgccttccaagtactccaaaatctttcagatctgtgtccctacccctgtttttagcatgtgttggggctccaggtccctgaaggtttctggcctgaaatccacctccccagcggagtggactgcgttctagagactccacactccgcgaggttcccaggcccctgagggacaaccgagtggcctgcgcacttcagggctccacactcggcaaggtctttcaagcccttggggtccccttcttagttttttccacctttctgggctgcagtcactccataaatgctgggatctgatccccacccccactctcgtttcctcaattctgcgggctacacgctctggcaaggtcctccgggccctggatcccctccctctccctatgcccacgctcctagtcagcccttctggggtccactattttcaggaactaaccgttctcatggagccttgctaaccggaaagctgtgtggaagaaaggctttgaggatagaggtggagatttggctcttccatagtgccactcacccaccccaccatgctgccactgccagacccggacccctgtttcagaacaagtgaccagattcgctcctggacagccctggacactggccttttctctgaaaactactcaccctttctctagtccccacttcatgccagcctcataccctcttccttcccccacgctggcttccgggatcctcctctgctcagacaacctcttctgtgtcccacccccgtttttagaatgctttggggcaccaggttgggggaaggtttctggcctgatatccatctctttccaaactcccttcttcccttgaaaggcttcttgccttcagccccacttctggctccgaggtttcaggacaccctcctcttcatcctcattcttttgaccaccagctttttaggaattcgaacgtccctctcatcttcgtgaatcctgtccaggcatttgttgaccccttcatctgatacccctgacctcacattgccaaaagtctacccctacccagtacactggaattagacaaaatcccaggagttttacctcaactctgagtgtgcccacaggagctctccctgaagccacgtccttttaagcagggtctagggttcctcccttgtcttaatgaactctttgtcacacggaggacgttatggagcccttatgatctttcactgcctttctgcccagcgttttgtctttccatggacatttataatattttccatggacattttgttctctcaatgtccacccctaatttccaacatcccaaagattctcatgtgtttcctgaaagccatttacaggaatggctgtgcccagacccccttccccaggatcctccttcacacctggtaggtgcctctcctagagagatttgcactcagttgtcgtgcagtcacatggcccagatggttgttaatcacccccttcctggcaacagctagcagccagggaatcactggcacagaaacctcagggtgaccaagatgaggccacctctgtgctgaaggctgtgctccagagcctgcttgggatcaggcttaagcaggtcttcagccagacctgatgttacctggtttccttgagctgccctgcctgagctatcgggagcactccctcaatgcacatcttgattccctatctcatgctctgcttctagaaaccatgagctatcaattgctactggcaatggtcctgggaagtcaaccctaagtatggattctggggttggatgactccccacaggacttcagtgagcaacaatcactgctggcagttggaggacagagtcgctagggcatgtgaccactgtgaaaccaccgatgtttcacctggggtaattttggatgaactacggtagaagcactgaaggtacattgcttttggtttggaagattgtaggtaaataatagcgatatgaatgtggaattggatggctgcaaacgagtgccattgatgcattgaaagaggaaaagtcaggctgtcacctgtcactcagcaatttaaagtgtgagagttgggactagatgtggtggctcacatctataatccagagattcgggggaagcttgaagaggtaggatcttttgagtccaggagttccagaccagcctggacaccagagcaagacctcatctctacaacaaaattttcttaaaaattagatgggcttggtggcacgcacctgtacttgtagatctagctaatggggagcatgagataaaaaaatcacctgagtcagggacttaggggttacaatgaggtatgattgtgccagtgcacacactcccacctggccaacagagtgagattctgcttccaaaaaaataagaaataaatcaggtttgagagttggaaagcatcatcttctcctagagccaaaggacatgtacaactgagacccaggaacaaagcttcatcacaaagagaccatcatcagtggagccgggagatgcattccccctcaccctgccttgaggaggcagtggagtcatctgtctgggatcctttctgacccagccctatttgtttgtctctttggcttctttggatttgtatattttagctgttataacactgtaaaacaaacagagtgatttttttgagttgtgtgaatgatgctagctccatagtcaccctgagagtgatgggaacttttgaatttgtggcaagttggagggtagtgtaagtgacctgagattgccaaattggggctagcactggatgtgaggttaggctagtggaaaaatatgcccagaaccagaggagtgtgggctcactgcaggtggttaggctcagatccaaattgtacagatggatagctttggggtaaagaataacatagttgagaagtgcatgtgttagtctgttcatgcactgctataaagaattacctgagactgggtaattatttataaaactcaggtttaattgggtcatggttccacaggctgtacaaaaagtatgatgctggccatcagctcaacttctggggaggccccagaatagttagagtcatggcaaaaagtacaagggaagcaggctcatcttccacggccagagctggagcaagtggtaggagaggtgatacacactttcaaacaagtaggtcttttgagaactccatcaccggacagcacctatgggatggtgctaaattattcatgaaatatccgcctccataatccactcaactgtcaccagcgcagccagccccacctccaacagtggggattacaattccatatgaggtgtgggtggggacacagctccaacctcaatcagtgggcatcctggattgggtctactatagaaggagaaccaggagctgactatgatcttgaaccctacccatgatggccgggcggggtgactcatgcctgtaaccccagcactttgggaggctgaggtgggtggatcgcctgaagtcaggagttagagaccagcctggccaacatggtgaaaacctgtctctactaaaaatacaaaaaattagaccggcgttgtgctggatgcctgtaatcacaccactacgctccagcatgggaaaaaataccaaaacttcgtctcaaaaaaaaaaaaaaaaaaaaaaaaaaaaagactgcccatgaccactgcaccagtgagagggacaccagcatcactgagatgcaagggctggacattcttcataggtcagagctcaaagcaggggacactgatacagagatgggctccatccatagcaccaaagtggtgagaggatgtgggaatggcagaggccagcactttgccatcaatgcaagggggtataaggaggtgacaccagtgccagagtacatcacggggggactgccctacaatatctaggacttacctcttagagcgtgtttcattagcgacaacagatataaatggcagacaggtgtgtccctgcattaacaggaaatagaaatcatcaagaggaacagaaggcagatgtcagcagccccttagaaagtcatcatccttcatacagttaaaatctgagacagttctcacacgagaaggcctaactcaaaaagaggctgggttctcatgaggcaggtttatgcaaaaccaaggaaggtgtacaagtttggaattctccagtttcccttggaaaagacctacagtcatttgcttaggtaactgagcactgaacaaaggtgagtattgttgtcttttagaagctcttggccaagaaggccttgttggcataaaacccatggtttggaaacatcaccatgacccctgttagagtaatggcctaagggtgggggtcaggaaattgatgtattccttgccaacttctgcctctaagtgagtgaactctgtttgtgaacctctctcctctgtggttatgttcctaggctctcatgtataatcaggagtcatagacttagaaacaggaaaaatacttacagtgtttttgtggcctgtgagctatgacttataattttaggaaaaaaacaattgcaaatggaaagcctaagtctatcaatgctcatccaagacaacataatcaataaaaaccaatatcaaatctcaaggcaaattatttcctgtatatagatggcagagatgagcaccaccatcaaaaactcaaggaccagtgctgtgggtccagtcatctgtttcatggaattcaccagtctggtatcttcaaaatccagaaggatgatggcagatggcaggaaagtaatgcaaacgtcatcaggtgtgaccccactgtagcagctgtgatggatgttttctctcaccatagcaataaataacacaacctcggtcacactgtatgcattgttggtctgcaaaatccatgttttgcaaaactcttcaggaaggtggatctgtaatattggcattgacatgagaacaacagcagtatttattcacaatctcaagctctctgtcttcccgtctctctcattagccatccaagtagtcctgaggaaccaagcccatcagaacattctgcaacataatacacagctccattctccattcaaattttgttgttgttgttgttgttgatgagacaacatcttactccatcagccaggctgacgtacagtggggctatctgggctgactgtagtcttgagcttccaggctcaaggcatcctctcacctcagcctcctaagtggcttgaactacagacacacagcgacatgctgggctagtttttgtatattttgtagagacgtgctctcaccatgttattcaggctggactcaaactcctgagcgtaagtgatccaagcaccttggcctcaaagtgctgagattacaagcctgagccactgcacccagcccaatctccattctactgataacaatgtcattaccaggtctgatggacaggaaatggtaaggtttctgaaaacctaaggatcacacagcgagttccaaaggctgaaagtgcatacctgtcgacactgataccaatgacatccaatggtgagaatgacattccttgtagtcctagctctgctcataacaaatctatactgaagtgtaagagtttgatggtcatggggattttccatgtctctgcctttcagcgatgtgccatatctgtgaagtgttcagaaatgcaacagcctgaggcatgctgggcatatcctctaataaaaaggaaaatgccattttatggtcctgtatttctacaagttggaacacatgggcctgtgatccagatgggggaaatgggaatattcccactcattcaccttcatccacgaagcccatttgaaagctttgggcttcccatccttgtagattttagtgttgtgggctgggtgcagtggctttcacctgtactgccaacactttgggaggcctagacaggtgaatccactgaggccaaaagttcgagaccagcctggccaagatggtgaaaccccgtccctactaaaaatacaaaaattagcaaggtattggggccagcacctgtaatcccagctgctcgggaggctgaggctggagaatcgcttgaacccaaaaggcagagactgcagtgacccgatcctgcctttgcactccacctgggcaagcagaacaaaacttctgtcttgaaaaaaaaaacaaaaaacgaacaaaaaagatgttagagttctgggtttagaggtctataccccagaaagagaatggtttcaacaagggacaaagaagttgctttaaacgttgacttgccatttcttttcagtgtgtttgttctcttgcgtcaagagaccaccagaaaagtggtgcaattactctcctgtcaagaatcattgactatcatctgcaagagggtcagatcctggtatataattagggcagaaatacttagtctgagaagggtatgacatccagaggccctattaatgatgtccttttctccatgcctgactctgaccccatgtgctggactgcccctgtgtggatggcctcatggcctgctcggactctgaggtcccaccccaagtggcacctccatggagggctctactcttgtatgggctctgacactcacactgagacactctcccatggacacctcttcacccacttggggtctgaaactgggctactccatccctccctaacctggaacagagagctttcactgctattacacaagtcatagaggctaactcctcatttttccaagctaattattgaaacattagtcctgggttgataagacaagataagttaacttttcataaatttgcttatcaagttttgaataaattcaaataaattcaccttccccacacaccttagttgtcgacatcacacgcgcacccatactcacagggtgagcacgaaggcttcactgtcagtggagaaagtggcaaaacccttctgtgcctcatcctggtctagacctggccctcatcctttcccactcttcccctcactcccttggattcatccacactggcctcctgcctgctgctccacctccctgcgaagctcacccctgcctcagggcctttgcacgtgcagtggcttcaagccatatcctcttcacccagatctcccagatctcctgaatgatcttcttttatcattcaggtctcagcttgcatgtaatcttctcagtgaggattacccaaaccacatagttcattcattcattcaaatattcattcaatggcatattgacaaagcagctacttcatgccaggccttgggccaggtgttatggatatggcaacaaacaaaacaagagttttctgctctcaaatttttacccacttaaaggagatatcatacatcatctgtaaataaatacatcatctgtaaataatgatgtaaataaatacatcatctgtaaatctgtaaataatgatgtaaataaatacatcatctgtaaataaataaagtataataaaagaaaatagtaggtttttttggttggaggtgaccgtgaagtttgcaaataccatcttacaacacattattttattttatttcatttcatttttaattttattattattatactttaagttttagggtacatgtgcacaacgtgcagatttgttacatatgtatacatgtgtgaagttggtgtgctgcacccattaactcgtcatttagcattaggtatatctcctaatgctatccttcccccctcccccaccccacaacagtccccggtgtgtgatgttccccttcctgtgtccatgtgttctcattgttcagttcccccctatgagtgagaacatgcggtatttggttttttgtccttgtgatagtttgctgagaatgatggtttccagcttcatccatgtccctacaaaggacacgaactcatcattttttatggctgcatagtattccatggtgtatatgtgccacattttcttcatccagtctatcattgttggatatttgggttggttccaagtctttgctattgtgaagagtgccgcaataaacatacgtgtgcgtgtgtctttatagcagcatgatttataatcctttgggtatatacccagtaatgggatggctgggtcaaatggtatttctagctctagatcactgaggaatcgccacactgacttccacagtggttgaactagtttacagtcccaccaacagtgtaaaagtgttcctatttctccacatcctctccagcacctgttgtttcctgactttttaatgatcgccattctaactggtgtgagatggtatctcactgtggctttgatttgcatttctctgatggccagtgatgatgagcatttcttcatgtgttttttggctgcataaatgtcttcttttgagaaatgtctgttcatatccttcacccactttttgatggggttgtttgtttttttcttgtaaatttgtttgagttcattgtagattctggatattagccctttgtcagatgagtaggttgtgaaaattttctcccattctgcaggttacctgttcactctgatggtagtttcttttgctgtgcagaagctctttagtttaattagatcccatttgtcaattttggcttttgttgccattgcttttggtgttttagacatgaagtccttgcccgtgcctatgacctgaatggaaatgcctgggttttcttctagggtttttatggtttgaggtctaacatgtaagtctttaatccatcttgaattaatttttgtataaggtgtaaggaagggatccagtttcacctttctacatatggctagcctgttttcccagaaccatttattaaatagggaatcctttccccacttcttgtttttgtcaggtgtgtcaaagatcagatagttgtagatatgtgacattatttctgaggactctgttctgttgcattggtctatatctctgttttggtaccagtaccatgctgttttggttactgtagccttgtagtatagtttgaagtcaggtagcatgatgcctccagctttgctcttttggcttaggattgactttgcaatgcggggtcttttttggttccatgtgaactttaaagtagttttttccaattctgtgaagaaagtcattggtagcttgatggggatggcattgaatctataaattaccttgggcagtatggccattttcacgatattgattcttcctacccatgagcatggaatgttcttccatttgtttgtatcctcttttatttcattgagcagtggttttagttctccttgaagaggtccttcacatcccttgtaagttgggttcctaggtattttattccctttgaagcaattgtgaatgggagttcactcatgatttggctctctgtttgtctgttattggtgtataagaatgcttgtgatttttgtacattgattttgtatcctgagactttgctgaagttgcttatcagcttaaggagattttgggctgagacaatgggttttctagatatacaatcatgtcgtctgcaaacagggacaatttgacttcctcttttcctaattgaataccctttatttccttctcctgcctaattgccctggccagaacttccaacactatgttgaataggagtggtgagagagggcatccctgtcttgtgccagttttcaaagggaatgcttccagtttttgcccattcagtatgatattggctgtgggtttgtcatagatagctcttattattttgagatatgtcccatcaatacctaattattgagagttttcagcatgaagggttgttgaattttgtcaaaggccttttctgcatctattgagataatcatgtggtttttgtctttgggtctgtttatatgctggattacatttattgatttgcatatattgaaccagccttgcatcccagggatgaagcccacttgatcatggtggataagctttttgatgtgctgctggattcggtttgccagtattttactgaggacttttgcatcaatgttcatcaaggatattggtctaaaattctcttttttggttgtgtctctgcctggctttggtatcaggatgatgctggcctcataaaatgagttagggaggattccctctttttctattgattggaatagtttcaggaggaatggtaccagttcctccttgtacctctggtagaattgggctgtgaatccatctggtcctggactgtttttggttggtaagctattgattattgccacaatttcagatcctgttattgctctattcagagattcaacttcttcctggtttagtcttgggaaggtgtatgtgtccaggaatttatccatttcttctagattttctagtttatttgcgtagaggtgtttgtagtattctctgatggtagtttgtatttctgtgggatcagtggtgatatcacctttatcattttttattgcatctatttgattcttctctctttttttctttattagtcttgctaccggtctatcaattttgttgatccttttaaaaaaccagctcctggattcattaattttttgaagggttttttgtgtctctatttccttcagttctgctctgattttagttatttcttgccttctgctagcttttgaatgtgtttgctcttgcttttctagttcttttaattgtgatgttagggtgtcaattttggatctttcctgctttctcttgtgggcatttagtgttataaatttccctctacacactgctttgaatgtgtcccagagattgtggtatgttgtgtcttttttctcgttggtttcaaagaacatctttatttctgccttcattttgttatgtacccagtagtcattcaggagcaggttgttcagtttccatgtagttgagcggttttgagtgagtttcttaatcctgagttctagtttgattgcactgtggtctgagagacagtttgttataatttctgttcttttacatttgctgaggagagctttacttccaagtatgtggtcaattttggaataggtgtggtgtgatgctgaaaaaaatgtatattctgttgatttggggtggagagttctgtagatgtctattaggtccgcttggtgcagagctgagttcaaatcctgggtatccttgttaactttctgtctcattgatctgtctaatgttgacagtggggtgttaaagtctcccattattattgtgtgggagtctaagtctctttgtaggtcactcaggacttgctttatgaatctgggtgctcctgtattgggtgcatatatatttaggatagttagctcttcttgttgaattgatccctttaccattatgtaatggccttttttgtctcttacgatatttgttggtttaaagcctgttttatcagagactaggattgcaacacctgcctttttttgttttccattttcttggtagatcttcctccatccctttattttgagcttatgtgtgtctctgcacgtgagatgggtttcctgaatacagcacactgatgggtcttgactctttatccaatttgccagtctgtgtcttttaattggagcatttagcccatttacatttaaggttaatattgttatgtgtgaatttgatcctgtcgttatgatgttagctggttattttgctcattggttgatgcggtttcttcctagccttgatggtctttacaatttggcatgtttttgcagtggctggtactgactgttcctttccatgtttagcgcttccttcaggagctcttttagggcaggtctggtggtgacaaaatccctcagcatttgcttgtctgtaaaggattttatttctccttcacttatgaagcttagtttggctggatatgaaattctgggttgaaaattcttttctttaagaatgttgaatattggcccccactgtcttctggcttctagagtttctgccaagagatcagccgttagtctgatgggcttccctttgtgggtaacccgacctttctctctggctgcccttaacattttttccttcatttcaactttggtgaatctgacaattatgtgtcttggagttgctcttcttgaggagtatctttgtggcattctctgtatttcctgaatttgaatgttggcctgccttgctaggttgcagaagttctcctgggtaatatcctgaagagtgttttccagcttggttccattctccccatcactttcaggtacactaatcaaacgtagatttaatcttttcacatagttccatatttcttggaggctttgtttgtttctttttactctctttcctctaaacttctcttctcacttcatttcattaatttgatcttcattcacttatatactttcttccacttcatcaaatcggctactgaaggtattgcatgcatcatgtagttctcatgccatggttttcagctctatcaggtcatttaaggtcttctgtacattgttttctctacttagccattcgtctaatcttttttcaaggtttttagcttccttgtgatgggtttgaacatcccctttagctcagagatgtttgttattactgaccttctgaagcctgcttctgtcaacttgtcaaagtcattctccatccagctttgttccattgctggtgaggagctgcgatcctttggaggagaagaggtgctctggtttatagaattttcagcttttctgctctggtttctccccatctttgtggttttatctacctttggtctttgataatggtgacctagagatggggttttggtgtggatgtcctttttgttgatgttgatgctgttcctttctgtttgttagttttccttcgaacagtcaggttcctcagctgcaggtctgttggagtttgccggaggtccactccagaccctgtttgcctgggtatcaccagcggaggctgcagaatagcaaatattgcacaacagcaaatattgctgcctgatccttcctctggaagcttcgtctcaaaggggtgcctggctgtatgaggtgtcagttggcccctactgggaggtgtctcccagttaggctagatgggggttagggacccacttgagaaggcagcctgtccattcacagagctcaaacactatgctaggagagccactgctctcttcagtgctgtcagatggggatgtttaagtctgcagaaatttctgctgccttttattcagctatgccctgcccctacagatggagtctacagaggcaggcaggcctcattgagctgcggtgggctcctcccagttcgagcttccagaccactttgtttacctactgaagcctcagaaatggtgaacacccctcccccacccagtctgccgccttgcagttccatctcagactgctgtgctagcagtgagcgaggctccatgggcgtgggacccactgagccaggcacaggatataatctcctggtgtgccatttgctaagaccattggaaaagcacagtattaaggtgggagtgtcccaattttcccagtacagtctgtcacgggttccctcatctaggaaaggtaaatcccctaaccccttgtgcttcccggtgacgcaatgccccaccctgcttcagctagccctccatgggctgcatccactgtccaaccagcccaatgagatgaacaaggtacctcagttggaaatgcagaaatcacccatcttctgtgtggatcaggctgggagctgcagaccggagttgctcctattcggccatcttggaatggcaatctatgtttgctttttacatttgaaaaaactggtgtcacgtacctaggtattaatcattgtggtatcctcttgccgatttacctctttatcattaactagtgaccctccttgtcttttgttgttacagtctgtgattttagtctattttatctaatatgagaatagctactctggcacttttttggtttccagcttcatgaaatatccttttccatttccctgttttcatttccctttcggtgtctctatagatgaagttgatttctttaaggcaccataagttgggtcttatttctttatccatttgaccatttagagaatttagaacactgtcagtgttattattcataagtaaaaacttaagagtgggtgtagtggtgtacatctgtatttcctgcactttgagagactgaggcgagctgatctcctggggtcaggagtttgagaccggcctggtcaacatgatgaaaccctgtctctactaaaaatacaaaaattagccaagcatgctggcatgtgcctgtaatccaatttacttgggaggctgaggcaggagaagcttgaacctgggagacaaatgttgcagtgagctgagatcacacagagaagtcatctccactctcctcatcagaacctcttgttcacagcatttgtgagcacaaatcaatgatggttattctttcctactaattagggatattttattacacagcaatagcctccagcaaagggaaccatcatacatgattcctacaagttgacagggctggaattatcactgaaaaactaaggtggctatacttgattcccaatgtccaatttttcatgaatagagaaatttatcctttttccccccagccagaaaccaagttttgctcttacgcccaggctggaatcaagtggcacaatctcagctcactgcaacctctgccccccagcttcaagaaattcaccttttgaacaaggagatattaaggatacactatgtgtatgctaccggtggttgcaggagactcagaaaagagagaaacagtcactggcctcgtgcaactgatattctcgggaggagagaaaggcaatcaagaaagaaacatgctgtatttcagacagctgtaagtcctccacaagaaaagaaagcaggtgaggaacataggaaatgtgtcaaccataaggttcccgctaattctataagttggtcagggatatcctccaagaataagcagcatctgagcaatcacctgaagggaggaaggaaggaagactgtgagtggtggcttacacctgtaatcccagcactttgggaggccaaggagggcagattgcctgagctcaggagttcacgaccactcagagcaacctgttgatacccaatctctactaaaaacacacaaaaaaattacccgggtgtggtggcacgcacctgtagtcccagcttccatgcccagctgatttctctctctccatatatatatatatatacacatatattgtttttgcagagatagggtctcactgtgtcacccagtcatcaagcaattctcttatactgttttggaaaagcatgggaattacaggtgtgaaataccctgctggtcctgaaaaatgtgatatttgggattctctgcctggcttgttttacccaaaataatgacctccagttccttccaggttgctgcaaaagacatgattttcactgttttataactgaatagtattcctgtatgtatacataccacattttctttatttattcttctgttgattgacatgtagggtgattccatgtctttgctactgtaaataatgctgcagcaaatatttgtgtgcattttgatctattcctttgagtaggtacccagtactgcaactgcaggactgagtagttgttatattttttgttctttcagaaatctccatagtgtttgccataaaatctgcactaatttacattcccaacaacaatgcataagatttccccttttctccacattctcactaacatttgttatgtttttgtctttttcataatacccattctgactggagtaagatatctcattgtggtggttgttgatatttttgagacggggtctcactctgttgccagactggagtgcagtggtgtgatcgtggcttgctgcaacctccacctcccgggttcaagcaattctcctgcctcagcctcccgagtagctgggactacaggcgcgtgccaacaggcctggctcattttttgtatttttagtaaagacagggtttcaccatgttggccaggatgatcacagtctcttgagctcatcatacacctgcctcagcctcccaaagtgttggaattacagtcatgaggcagcgcacccaacctcaatgtggttttaatgaccatttctctgacgattcatggtgtggagaatttctttgaaataccttttggccatttatatgtgctcttttaaaaactgactcctgtccaggtgcggttgagcatgcctgtaaccccagaacttcgggaggctgaggccaatggatcacttgaggcaaagaggcagaaatcagcctggccaacaaggcaaaaccccatctttactaaaaatacaaaaaatcagccacgggctgtgactcgtgcctgtggtgcaagttactcaggaggttaaggcacaggaattgcttgaacccggtaggcacaggtcacagtgagccaagatcatggcactgcactacagcatgggtaatagagaaagacctgtctcataaaaacaaatgaataaataaataagataaaaaataaaaaagtctctttatgtcctttgccgactttttaatgggattctttggagttttctgttgtagttgagatctttgtttactctcggtattagtcttttgtcaaaggaaaagtttacaaataatttcttccgttctgcagtttgtctgctcactctgttgagaggattatttctttggctgtgcagcagctttttgtttcagtaaagcttttgaatttatataattaaaattttcagtttggtttaaatttgcactggtcgatttttggttttgttgcctgtacttttgaagtcatactcttgaactctttactagacaataaccagaagagttttctctagttttcttctcacatttttattatttcagtacatatatttaagtctataattcatcttcaattgatttttgtagaaatagtgagaaataggagtccaggtttattcttctgcaaatgacaattcaattgttccagcaccaattattgaaaagggtgtgctttcctcaacgtatattcttatcagctttgtcaaagatcagttggctataaatgtgtggctttctttctgggctctctagtctgttacatcaatctgtgtgtctatctgtatactactaccatgctgtattggtgatgatggctttgtaatataatttgaagtcaagaaatgtgatgctcccagctttgtttatttgcttcagaaaggctgagtcaacagctgcagagatgaagctgcccctcctcgcagggctccttcccggaaaaagatcatggctcccactgaccatataaccatggctggaactcctgaaattcccaaagggaggccctacccagtgaggggggatgaatgaaggtcctacttaaggaatctgtctggccacaatcaggcacagcagctgtgctgccttgtgggggaccagaccacctggattccctggagcctgcaggctagaatgtctgagtccatggaaacacagaaatggaggccgccctcacctccccagaaaactgtagtctcaggcagtctccagccgattgccactggttggctgctattccaagccagtgggtcttaacttgagaggtgctgtggaagtggggcccacggaatgaggctgcttggctccctggattcagccccttttctaagggaatgtacagatggaactcccgccttgcccagctttccaagtatataaaactcctgagtctctgtgagtgtctgagcgagtgctctggcaacattcgacacggctctgtgtatctgacccaagacccttatggcatgagctaatgggaggatcttctgatccatgcgtggcaaagatgcatgggagaaacatggtttgtgggtaggggttgtgcattcactactgcttctcttggctgtaggtgaaggtttctttggctctgtgctgatactgggtgcaccatcacccaccccctttgtttcttctcctgggtcaagtcatttgcctaatcagtcccaatgtaggaacctggatacttcagttcaaggtgctgaattcaccgtgcttttcattcaggggaagacagctgcttctcattgggcatcttggcctgcccacttcacgtcactttttgtaaaatccacaccactccaggaatatccattacttaacttcgcctgaaataaacagaaggctcattacacttatcatgggctcacttacttcgcctataatgaaggtgccatggaaatgctagtggatgacgtggtccattttcttagggatgagatagaaaaatggtgtatggctttttaatttaattaaaatttttagtttggtttaaatttacattggtctctttttggttttgttgcctgtacttttgaagtcttactcgtgaactctttactggacaatgaccagaagagttttccctaagtttcttctgatattttgaccatttcagtacatacatttcagtctataattcactttaaattgatttttgtaaacatggtaagaaataggagttcagatttattcttccgcatatgataatgcaactgtcccagtaccaattattgaaaagggtgtgctttccctagtgtatattcttgtcagctttgtcaaagatcagttgcctatgaatgtgtggctttcattttggattctctcgtctgttacatcaatctgtgtgtccacatttatacctgtaccatgctgtattggtgactatggctgtgtaatatattttagagttaggaaatgtgatgctcccagctttgttcatttgcttcagctgaaaaggttgagtccacaattacaaagatggcagccgcccatccccggaggacctccaacccagaaagagatcaggcttcccaccaaccctataaccctggctggagttcctgaaattccaacagggaggaccttcccagtgaggagggatgaatcaaggtcaaatttaaagaaacagtctggccactatcaggcacagcagcagtgctgccttgtgggggacccctcctgctccagaccagctgccctccctggagcccgaaggctagattgtctgagtctacggaaacagagacggtggccgccccaaccacccagaactcggtagtctcaggcacttggcttgctatcttgccactgcttggctggtattccaagcccgtgggacttgagaagtgctgtgatgatggggaccacaggatgaggctgtctggctccctgtgatatggctgtgatgagtggaggaacaccagggctcatgtctcacacagaattggagaaaatgacacaaacacatgtacagtggttttatggcgtgcagtttaataggcaagaacgaaggaagagctccccatactgagacagagggaggggggctccaaagccaaaagaggaaacccggagtgctgtggataccaatgagttatatgaagaaactggagggggcggtgtctgatttgcatagggttcaggcgattggttcgaccaggcatgtcatttatgtggcccacggaaaaactggccctcccacctagcctttgaatatgcacgtgccggacaccctgatttcctacactcatggggatatatgggggtggccatatcgccaggcacaggtggggacaagggccagaagagggcgggaatcgctatgtttgggtggacccagtttctaatggccggcatctgcagatcaaggttaccggagaactctaaaagccggggctttcctgctagacaagactcatttctggagctgctttaaaaagaaacaaaacttcccaaggaccccttttcctccctgtctgcccaaaataatttcttaacaactcgtataacacctgaattcagcccccttactgggggaatgtaccaacggaactcccacctttcctggtttctcaaggctagattgtgtaaacctcctgggtctcggtctgtgtctgagcagctgctctgccaacactccacacagccctgtgtactaggcccaaggccgccgtgactcagcccatgggaggatctcctgatttcttggttgcaaagatccatgggagaaaaatggtttctggggcggggtcacacactcatggcttctcttggctgtgcaagaaggttcctttggctctgttccaatatagcgtggttcatcacccacccctgttttctttgttctcctgagtcaagttgtttgcctagtcagtcccaatgtgagaacctgaatatttcagttcacgtgcttatcgtgaaattcactgagactttaattcagtggaaggcagcctcttctaattggccatcttggcccgccccctccacgtcacctcccataaaatggccacgctctccagggacgatgccattatatatctttacgtgaaaccgacagaacacttattacactttttgtgagctcatttacttcacttataatgaacatggccatggaaatgctagtggagaaagtggtcgattttctgatggatgtgataaaaaaatggtttgccgaccaattaatgacatatgtctcaaaactagtaacgagacccttaatcgctgggttgaagtttctaatcaagaagatgctcatctatgtattcaacaaagcagcttcccttgcttctgaaatgcttccaaacaacatctcatatttcctgaagaagataatgcctggacaagcagcacaagtcattcaggtttactttcagctcataaatccagcaggatattcgcacaattgttgggaaaccttatcagttcatgagtcgtgcatgtttcctttaatttcaggaggaagagggtaatctggaagagtttcctgacctactctgctgctgtgattaaacaaccaccaggaaattttgatgacactgttctcctgagctcctccctttcctcggggaagaaaagcattgaaactacaaaaataaagtgttatttggctggagtgaggtctcatgtctgcttatgcggtggctcgctgctcagaacagggtgagtctctgagttgtacgctgaggaggggaggctgtcaatctagaaaaaacccattgcatgggacacctccatggggtctggggggctgaggatgaggagctggactggatctagggaaggaggaggtttcagagggtgaaattctggcagtaaatcctgggggtgtttgaaaacttcctccctcagaaggagaagactcagggaggaataaggacaaaccatgggtcccttgaggggcatttactaacttaagaggactttatcgggaagcagagtgacaatggcctccttgaggactgaggcccctggataaatgaggcccagatccagatccagtccatgggagatgagaccttcaagggacatatttttgttgggacagaggaaaagtgcagctctgcagctgcagaggaagccttggcagtgtgaaagcgaccttggagggggccctgtgcgttctgaatgcttctgaggtccatcccctgtccccgcctctttttctggattttttgggctccatggtctccgccatcttctgagcgctccacgctgccaccttcagttttctcttctgggctccaaatactccaaaatctttcatatctgtgcccctacccctgtttttagcatgtgttgggactccaggtccctgaaggtttctggcctgaaatccacctccccagcggtgtggattctgctctagagaccccgcacttggcaaggttcccaggcccctgggggacaaccgagtggtatgtgcacttcagggctccacactcggcaaggtctttcaagcccttggggttccctcctcagttttcttcacatgtctgggatgtagtcactctataaatgccgggatgtgatccccaccccagtgattttttttagttccatgagtgttgctatctgaatagtcatcctgagagtgatgggaccttttgaatttgcagcaagttttagattagtgtgagtggcctgagatcgcaaaactggggctagcattggatgtgaggttaggctggtggaaaaatttgcccagaacctgaggagtgtgggctcactgcaggtggttaggatcagcacagaattgcaaggatgtatagctttggggtaaagaataacatggttcagaagtacatgtattagtcttttcatgcattgctataaagaattacctgagactgggtaattaattataaaaactcaggtttaattggctcatggttccacaggctgtacaaaaaggatgatgctggccatcagctcaacttctggggaggcgtcagaaaacttagagtcatggcaaaaagcacaagggaatcaggctcatcctccatggccagagctggagctagtggtaggagaggtgctgcacacttttgaacaatcagatctttttagaactctatcaccagacagcacctagaggatggtgctaaattattcatgaaatatccacccatatgatccactcaattctcaccggcccaaccaggaccacctccaccattggggattacaattacacatgagatgtgggtggggacacagatccaaactcgatcagtgggcatcttggactgggtctactatagaagaagaaccaggagctgactatcatccttaagactgcccatgatggccaggcagggtggctcatgcctgtaatcccagcactttgggaagccaaggtgggtgaatcccctgaggtcaggagtttgagaccagcctcgccaacatggtgaaaccctgcctctactaaaaacacaaaaaattagatgggtgttgtgccagacgcctgtaatcacagctactccagaggctgaggcatgagaattgcttgaacctgggaggcggaggtggcggtgagccccaatcgcactgctacactccagcatgggcaacaataccaaaacatcgtctcaaaaaaaaaaaaaaaaaaaaaaaaggctgcccatgaccactgccccagtgagagggacaccagcatggctaagatcaagtgctggacattcttcatgggtcagacattaaagcaggccacactgttacagagatgggctccattcatagcaacaaagtggtgagaagatgtgggaatggcagaggccagcactttgccatcaatgcaaggtgggcataaggagctggcaccagtgccagagtgcatcaggggaggactgctttgcaatatctagcacttacctcttagagtatgtttcattagggacaacagatataaatggcagacaagtgagtcccttcagtaacaggaaatagaaatcatcaagaggaacagaaacagatgtcagcagccctcatataaagtcatcatccttcatccagttaaaacctgagacagttctcacataagaaggtctaattcaaaaagagactgggttctcatgaggcaggttcatgcaaaaccaagggaagtatacaactttgggattctccagcttcccttggaaaagacctacaatcatttgcttaggtaactgagcactgaacaaaggtgagtattgttatctttcagaagctgttggccatgaaggtcttgctggcataaaacccatggttggaaacatcaccatgacccctgttagagtaatggcctaagggcaagggtcaggaaattgatgtattccttgccaacttctgcgagacgagtgttggtccactcatctctttcacggaattcaccagtctggtatcttcaaaatccagaaggatgatggcagatggcaggaaactaatgcaaacaccatcagttgtacctccactgtagcagcagtaatggatgttatctcttcattgtaatatccagggagggagaagatgacattattctcaatattctaaacaccctgtgtgtacagcctctgtgatattttttgtaatatccgtgtgggagagaattatattactcctaatatctcaggggttgtgccccctctgtgacaatgttcctaacacccaggaggggataggatgatatcacttttagcatcacagggggtgtacaccccactgtaatattgttcataatatccgggggggagagaatgatattactcccaatatcgcaaagactgtacaccaacctgtgatattatttgtaatatccataagaggaagaataatattactcccaatgtcacaggaagtgtacacccttctgtgatattgttcaaaagatccagttagggaggggatgatattactctcaatatcttaaacaccctgtaggtaagccctctgtgatattcctcataatatccagagggagaggatgatattactcccaatattgcatgaagtctacaccccacctgtgatattgttcctaatatccaggatgggagaggatgatattactcccaatgtcgcaggggatgtacaccttccctgtaatattgttcgtaatatctagaaaaggagaggataatattactttcaacatcgcagggggtgtacaccttccttgttatattgttgctaatatccagggaaaaagaagatgacattaccaccactattgcagaaggtgtacacccccccttgatatagttcctaatatccagaaaaggagaggagatattactccaaatattgcaagaggtgtacattcccctgtaatatttttcctaacattcaggaagaaagagagtgatattgcccttaatattgaagggagtgtgccccccccgtgatattgtttctaatatccaagaaatgaaaggatgatattactcccaatatcacaggggctgtacagccccctcccatgatattgttcccaacatcggggggggggtgaaatagtattattcccagtatcacaataggtgtacacacctgtcgtgatattgttcctaatacccatgggggaaaggacgatattattcttaatatctcagagggatgtacaccctccctgtgatattgttcctaatatccggggtgggagaggatgatattacccccaaaatctcaaagggtgtacacccctcttgtgatattgttcctaatatccagggtggagaggataatattattcccaatatccaggaaaggaaacgatgatgttactgtgaatattccagggggtgtcctcccctctgtgatattgttcctaatatccaggttggggagattatgatatttctccaaatatcacaaggggtgtacaccaaccctgtgttattgttcctaatatcgatggggggagaggacgatattactcccaatatcacagggggtgtacaccacctttatgatattgttcctaatatccatgaagaaagaggatgatattactttcaatatcgcaggggatgtacactccccctgtgatattgttagtaatacctaggagaagaaagtgtgatattactcccaatatcgcaggggatgtacacgcttcctgtgatattgttcctaatatttagggggaaaggggatgatattactcccaatatcgaatggtgtgtacacccccccgtgattctttttttttttttttttttttttttgagatggagtcttgctctgccgcccagactggcgtgcaatggcgcaatctcggctcactgcaacatttgcctcccaggttcgcacgattctcctgcctcagccttcggagtagctgggattataggcagctgtcaccataccaggctaatttttgtatttttagtagagttggggtttcaccatgttggtcaggctggtcttgaattcctgacctcaaataatccacccaccttggcctcccaaagtcctgggattacaggcataactttccctgtgatattcttcctaatattcaggaagaaagaggatgatattgctcccaatatcgcagagagtgtgcactcctcctgtgatatggttcttaatattcagaggaggagaggatgatattactttctatattgcagaaggtgtacacctccctcgtgatgtctttcctaatatccagtgggggagaggttattagtctcaaaatcacagaaggtgtaaacccccatttgatattgttcctaatattcaggggtggggagagaaaggtattactcctagtatttcagggcatgaacacccccaccgtgatatcattcctaatatccagaaggggaggcaatgatatttctcctaatatcacaaagggtgtacaccccttctgtgatattgtaaatattctgtgtgtacacccccctgtgttatagtctgtaatatccgggtgggggagagggtgatatttctccccatattgtaggggatgtacacccttctgtgatatggttcgttatatccagggaagaaaaaggtaatattgctgcccatattgtggagagtgtacacccccatgtaatatggttcgtaatatccaggagtggagagggtgatactgctccttacatcgaggaaggtgtacaccttattgttatatgattcgcaatatccaggggaggagagagtgatattgctccccatgtcgcagggggtgtaaaccctccgtgatatgattggtaatatccaggaaaggaaagggtgatatttctccccatatcgcgggggacgtacatcctcctgtgatatggttcgtaatatccaggaggaaagaggaaaatattgctcttcataacccgaggggtgtacaacccctgtgatatggttcgtaatacccagaagtgtacacccctctgtgatatggtttgtaatatccagggggttagagggtgatattgctccccatatcgcagtgggggtacacccccctggattggttcataatattcatggggggagaaatttacatttatcctcatatcagggggggtgtacaccccccgtgatatggttcgtaatatccaggggaagaaagggtgatattgctccttatatcgcggaaggatcaccctcccctgtgatatggttcataatacccagacgggaagagggtgatattgttcttcataaagcgaagggtgtacagccccctgtgatatggttcataatatgcaaaaggggagagggtgatattgctccccatatcacggagggtgtactcccttctttgatatggttcgtaatatccaggggtgtagatggtgatatagctcgccctattggggagggtgttcacccctctgtgatattgttcgtaatgtccagggaaagagaggatgatattactcccaatatcgcagaaggtttacaccactctgtgatattgttcataatatccagggaaggagaagacgatattactcccaatatggcagggggtgtagaactcctgtgatattgtttgtaatatccaggcaaggagaggatattactctcaatatcgcagaaggtttacacccctatgtgatactgttcatgatatccagggaaaaagaggatattactccctatatcacaaagggtgtacacccctttgtgatattttttgtaatatccaggggagagaggataatattactctcaatatcagaaggggtgaaaaccctcctgtgtcattgttcataatatttagggaaggagagagtgatattactccaaatatcacagtgggtgtacacccccctatgatattgttcctaatttccagaaggggagatatgatattattgccaatatcgcagaaggtgtacaccttactctgacattgtttgtaatatccagatggggaaatgatgatattactcctaatatcacagggggtgtacacccccttgttttattgtttgtaatattcaggggaagagacgattatattactcccaatatcgcagggtgtgtacaacactctatgatattgttcataatatccaggggaggagaggaagtgtacacccccccgtgatattgttcgtaatatccagaggtagagaggatgatattactcccaatattgcaggtggtgtacacctttctgtgatattgtcatgatattaagaaggggagaggatgatattactaacaatatcacaaaaactgtacactccctgtgatattgttcataatatccagaagaagggaggatgatattattctgaatctcgcagaagatatacaccaccctgtgatatggttcataatatcctaggggaaagaggatgacataactgtcaatatcgcagggggtgtacaattccctgtgatattgttcacaatattcagagggaaaaaggataatattactttcaatatcgcaggcggtgtacacattactgtgttattgtttataatatccggaatgagagaaaattttctcccaatatcacaggaggtgtacactcccctgtgatattgttcgtaatatccagggaggggagaggatactattactcccaacatctcagggagtgtaggccccccctttgatattgttcctaatattcggaagtggagaagatgatattacttccaaaatcgcagggggtgtacactccctctgtaatattgtttctaatattcatgagtggaaagaaagatattactcccagtattgcaggggacatacaccacactgtgatcttgttcacaatattcgggggggagaggatgatattactcccaatatcaaagtaggtgtacacccccttctgatattgatcgtaatatccagaattaaagatgataacgttactcccaatattgcagggggtgtacatttttgaatactgttcataatattaagagggggaggggatgatatctgtcccaatatcgcaaagtgtgtacacctcctgtgacattgtcccaaatatccagaggaaaaaaggatgttattactcttaatatctcagagagtgtacacctccctgtgatattgtttgtaacatccagaagaaagaggctgatattactcttaatatcgcagggggtgtacacccccgccccgggatattattcgtaatatccagggggaagtggaatgttcagaatgggagaggatgatattacttgcaatatcatagtgggtgtacaccccactgtgatattgtttgtaatatccgggaaaggagaaaatgacattcctccccatatggcaggggctgtacaccacctatcatattgttcaaaatatccagaaggggagaggatatgtctccaagtatcacagggggtgtacaccccgctgtaatattcttcctaatatccagggtgtgagaggataatagtactcccaatatcccagggcatgtacaccccccttgtgatgttgttcctaaaattcatggggagaaagaatattactcccaatatcacagggggtgtacatacactctgtaatattgttgccaatatgcagcaggagagaggatgatattactcccaatatcacaggggctgtacaccccgctgggatattgtttctaatatcaagggggaaaaaggatgatattactcccaatgtcgcagggtgtgtacttcctctttgtgacattgttcctaatatccaggagagaagagggtgacattccttccaaaactgaaaggggtgtacacaccctttgagatattgtctttaatatccagaacgaaacaggatgatataactcctaatactgcaggggggtacaccctctctgtgatactgtttctaatatccaggaggggaaagaaaaatattaatcccaatatcacagggggtgtacattccccctttaatattgttcctaatatccaggaagacacaggatgatactatttccagcagcacagggcatgtacacccctttgtgatattgttcctaatatccaggaaaagagaggatgatattactgtcaatattgcagggcgtatacactggttctgtgatattgtttctaatatccgggggtggagaaaatgatattactcccaatattccagcgggtgtacacccgttctatgatattgttcctaatatctgggggagagagaatgatattattgtcaatatcacaggggatgtacagattccctgtgatattgtttctaatattcacagggggagaagggtataatactcccgatatcgcagggggtgtacactccccctgtgaagttgttcctaatatccagggattgagagaatgatattactcccaatatcacaggcggtgtaaaccccctgtgtgatattgttcctaacatccagaggaaaagatgatgatattattttcaatatcacagggggtgtacgcatccctgtgatattgtttctaatatccaggggaggagaggatgatattattgttaatatcgcagggggtgtaccccaccctgtgatactgttcctaatatccggggtggaagaggataatattgctcccaatatcgcaaagggtgtacaaccttcctgagatattggtcctaatatccagggagggagaggatgatattactttcaatatcacagggagtttacacaacccctgcgatattgttcctaatatccagcggaagaagagttaggataatactattttcaaaattgctgggtctgtaccccctccccgtgatattgtttctaatatccaggaggggagaaagtaatatgactcccaatatcttagaagatgtacaccctccccataatattatttcttacatccagggggtagaggatgattttgctttcaatatcacagagggagtaaacctttccggtgatattgtttttaatatttaaaaagagagaagataaaattactcccaatacaaaggggatgtattgtgtactcccccctctgatattcttttttaatatccagatggagagaggatgatattactttcaatattgcatgggatgtataaatcccctgtgttattgttctgaatatacaggtggggagagtatgatattactccaaatatcgcagggggttctttccccctgtgatattgttcctaacattcagggagggagaggatgatattactcttaatattgcagggggtgtacccacgcctatgatattgttcctaatatccagagggggagaggatgatctaactcagaatatgacaaggggtgtacacacagcctgtgatatggttcctaatatacaggggagaaggggataatatttctcccaatatcgcagggggtgtacaaccccctgtgatactgttcctaatatacagaaggggacagcatgatattgttcctaatatcgcaggaggtgtacaacgccctgtgatattgttcctaatatccagggcgggagaggatgatattaccctcaatatcgcagggggtgtgcactttccctgttatattgttcctatgatccgggtggggggaaatgacattagtcccaatatcgcaggatgtgtgcaccgctcccccgtgatattgttcctaatatcaagggggagagaggaggatattactcccaatatcgcaagggatgtacatcctccatgcgatattgttcgtaatattcaggaggagagaggatgatattactcttaatatcgcagaaagtggacacccaccctgtgatgttcttcataatatccagggaagcagacgattatatgactttcaatatcgctgggagtgtacatcccttttgggatattgtttctaatatccaggaagggagaggattatattactctcagtattgcaggcagtgtacaccttttttgtgatattgttcctaatattcagaaagggaaaggatgatattactcccaatattgcaggtggtgtatatccccctctgatattgttccttatatcaaggaagagaaagaataatattactcccaatatcaaagacagtgtagacccctcctgtgatattgtatttaatatccatggggaaagaggatgatgttactcccaatatcgcagggggtttacacccacactgtgatattattcctaaaatccagtggaggagaaaataatattgctcccaatattgcagggtgtatacaggccctcccccgttatattgctcctaatatccagcggtggagaggatattactttcaatttgtgtagggagtgtatacccccctgtgatatttttctaatatcaaggatgggaaaggatgacattactcccaatatcgcaggaggtgtacacgccctgtgatattgttcctaatatctagggaaggagaggatgatattactttcaatattgcaggagctgtacaccctctgtggtattgttcttaatatttaggttgggagaaaatgatatgagtccaaatatcgcagaaggcatacacacttccaataacattgttcttaatatccgggggagagggtgatattactcccaaaatctctggggggtgtacacccccttctgatatttttcctaatatccagggaaggaaacgatgatattactataaatattccaaggagtgtacaccttcctaatatcctaatattgttcctaatatccaggggtgggagaggattatattactcccgatatcgcagtgggtgtacacccctcctgtgatattgtttctaatatccaagctaggagaaaatgatatcactctcaataccacagggggtgtacaccttccgcatcatattgttcctaatattcagagggaaagaagatgaagttactttcaatatcggaggggttgtacacaacccctgtgatattgctgctagtatccaggaagaaaggggattatgttactccccttatagcagggggtatacacctcccctgtaatattgttcctaatatcaaggctgggatatacgtggggggaaggatgatattactcccaatatcgcaggggttatacaaccttctgtgatattgctcctagtaaccagggcagaagaagatgatattactcctaatatcgcaggaggtgtacactcccccattatgttgttcccaatatgcagaaaaggagaggatgacattattgccagtatcgcagggtgtgtacaccacccctgtaatattgttccaaatatttagggggagagaggatgatattactcccaacatcgcagggggtgtacacacatcccctgtaatatagttcttaaaatctaggggaaaaggggatcttatttctctaaatattgcagagggtgtacactccccggtgatattgttcctaatagccgggagggagataattaaattactttcaatatctcagagagtgtacatcgcccttgcgatattgttcctaatatccagagcaaaagagaatgatattactcccaatatcttaggagtgtacatttaacctgtaatattgttcctaatatccagggggaagagaatagtattactgccaatatcgtaggggttgtacaccttttctgtgatattgttgcaaatatttagtagagggaaagaatattactcgcaatatcacagggaatgtatacttcccctgtgatattgttctgatatccagaaaaagagagggtaatattactcccaatattgcagggggtgtacaccccccttgtgatattgatcctaatataaaggaaggaagaggatattactcctcatatagaaggggttgtccaccccccttgtgatattattcctaatattcagggaagcagaggatgatattattttcaatatcacagagggtgtgcagtccacctgtgatattgttcttaatattcggggggagaggatgttattatgcctgatatcgcagtagaggtacacccctcaagtgatactgttcctaataaccaggggtgaagaggatgatattactcccaatatcgcaggtggtgtacacccccccatgatggtttctaatatacagagggggagaggaaaatattactcccaaaatcgctggaggtctacaccccccttgtgatattgttcctaatatccaggaaaggaaacgatgatattactgtgaatattccagggggtgtacacccgctttgtaatattgttcctcatatccagggtgtggagaggattatattactcccagtatcgcagggggtgcacgacgcccctgtgatattgtttttcatatccaggaggggagattattatcaatatggcaaggggtgaacaccccctgtgatattgtacttaatagttaggttggcagaaaatgatattagtctcgatatcgcagggggtgtgcactccgcctggtgatattgcttttaatatcaagggggagaaaatggcattactcccaatatcgcagggggtgtacaccgctcatgtgatattgttcctaatatccaggtggagagaacataatattactcccaatatcgcacaaggtgtacacccctcctgtgatatggttcctaatatccatgggaggagatgatgatattactcccaatatcacaggggatgtacaccacccttgtgatattgttcctaatatccagggaagaaaacgatgatattattgtgaatattacagggagtgtacacactccctgtgatattgtttttgatatacagggtgggagaggatgatattactcccaatatcacataaggtgtacaccccccgtgatattgttctaaatatttcggtggggagaaaatgatattagtctccatatcacagggggtgtgtgctcctcaggtgatattgtttttaatatcaagagggggaggagattatattactttcattatcacagggggtgtacacccctcctgtgatattgttccttatatccaggcgaggggaaaataatattactctcaatatcgcaggaggtgtacacaccccatgtgatattgttcctaatattaagggggaaagaagataatattactttcaatatcacagggtttgtactcctttcttgtgatatagtttttagtatccagggggaaagagcatgatattactcccattgtagcaaggggtgtacacacctcctgtgatattgttcctaatatccagaagtggtgaggatgatattactcccaatatcgcagggggtatacaccccacctatgatattatttctaatatccatgggaaaagagtatgatattacacccaatgtcgcagagggtgtgtatttttcctgtgatattgtttctaatattcaggcggggagaagatgatattactctcaatatagcagaaattgtacatccccgctgtgatattcttcataataatcagggaaaaagaggatgatattactaccaatattgcaggggggttacacttcccctatggtagtgttcctaatatccaggaagaaagaggatgatattaatcccattatccaggaagtgtacacccaccctgtcatgttgttcctaatatccagcagggaagaggatgatattacaccccccccccgtgatattctccttaatatccaggaggggagaggctgatattactggatatatagcaggggtgttcataccttctgtgatattgttcctaatatccagaaaaggagaggatgatattacttccaatatcgcagaaggtgtacacctccctgtgatattgatcctgacattcagaaggggagaggatgatattactcaaaataccgcagggcatgtgcattcccttgtgatattgttcctaatacccagaagggaacaggataatattactttcaatatcgcagggagtgcacacccccctttggtatggttcttaatatccagaaggaaagagggtgctattactttccatattgcaaggggtgtacaccccactgtggtatggttcataatatccaggcagggagagggtgctattactccccacagtgcggggcatgtacaccctgctgcggtacggttcctaatatccagggggagagaggatgctatgactccctatatcgcggggtgtgtacacccctgtgtggtatgttttgtattctccaggaacggagagggtgttgttacccctcatatcgctggaaatgtacactcccctgtggtatggttcgtaatatccaggggattgagggtactgttacccccatactccccatatcgtggggggagtgcacctccctgtggtatggttcgaaatatccagggtaagagagggtgctattattccccattttgcaggaggcgtacacccccctatggtatggttcgtaatatccggggtgaggggatgctatcaaaagaagagagaaagagaccccccatattgttctatattattttatactcagtacctgttttaagaagaaacaaggaagtgaaaccaaaagcaggcagcccggcgccaggcaccagacccaaaaccagacccgaaaccaggcctgggcctgcctgaccttagcctgatagttaaaattcaacccatgacctagcaaccaatgttatccatagattccagacattgtatggaaggacattgtgaaatttcttgttctgtgctgtttcactctgattaccggtgcctgcagcccctgtcacatacccactagattgctcaatcaatcatggccctttcatgtaagatctttagtgttgtgagcccttaaaaaggacagaaattgtgcactcaacaagctcggattttgagacgctagtctttcgatgcttccagctgattaaaagccacttccttcactacctcggtgtctgtggggttttgtccgcgactcctcctgctacactatgactccccatatcaaggggggtgtacacccccctgtggttcgtaatatccagcaggggaaaaggtgctattactccccatattgcagggagtgtacacccccttgtagtatggatcgtaaaatcaaggggggagggaaggtgtaattatccccatatctcagggggtgtacacccctttgtggtaaagtttgtaatatccagggatattacagggatattatccccaaattaatacttttataatttcttatgcctgcctttactgcaatctctgaacataaattgtgaagatttcatggacatttatcacttccccaatcaatacttttataatttcctatgcctgtctttactttaatctcttaatctcatcatctttgtgagctgaggatgtatgtcgcctcaggaccctgtgatgattgcattaactccacaaattgtttataaaacatgtgtatttgaacaatatgaaatctgggcaccctgaaaaagaacaggataagagcgatgttcagcgaacaagggagataagcataaggtctgactgcctgtggggctgggcagaacagagtcacatttttcttattgcagaaaatgagtaggagaaatatcactgggaagggaacgcattcctaggggaggcctatggacggccgctctgggggtgtatcccttatgtggttgaagataagggatgaaatacaccctggtcccctgcagtgccctcaggcttgctaggattagaaattccagcctggcgaattctagtcagaccagttctctgctcttgaaccccgtttcctgttaagatgtttatcaatgacaatgcgtgcacagcaggacatggaacctcaatagtaattccattttctccctggccttgtgaccttgctaggcccttctgcccttgtgatcttttattgccatttgaagcatgtgatctctgtgacccactccctattcgtatccccctccccttttgaagtccctaataaaaacttgctggttttgcagatcaggtggtcatcacagaacctgccgatatgtgatgtcaccccggaggctcagctgtaaaatttctctttcgtactctttcactttatttctcagaccaggtgacacttaaggaaaatagaaaagaacctactttgaaatattgggggctagttcccccaatagacattgttcctaatatccagaaaaaaagaagatgatattactcccaatatcacaggggttgtgaaccccacctgtgatatggttcctaatatccaggaagggagagaatgatattactctccatattgcagggggtgtgcacatccctgtgatattgttcctaatatccaggggaggagagggtgatattactcccaatattgcaagggttgtaaactccaccctgtaatattgctcctaatatttaggatttagggggggagaggataatattactcccaatatcgcaggggatgtatatgccctctttgatattgttcctaatatccagggggggagaggataatattactttccatatcacaaagagtgttcacccccctgtgatattgttcctaatatccaaaaaggaagaggatgatatcaatcccaatatcacaggaagtgtacaccccccccttttatattgtttctaatatccaggggaaatgagggtgatatttctctcaatatagcagaatgggtacactccccctgggatattattcctaatatccaggggaaaaaaagaggttgatattcttcccagtatagcagggaatgaatacaccctttgtgatattgcttctaatatcaaggggaaaagaggatgatatgactcccaatatcacaggggatgtaaacctgtggcgttgttgctaatatcaaggagggaagagtatgatattactcctaatgtcgccgaaggtgcacactttccctgtgatattgttcctaatatccaaaagggaagagaatgatattacccccagtattgcagggtgtacaccacccctgtgatattgctcctaatacccaggaaaaaagagaatgctattacccccaatatctaaggggacgtataccttccctgtgatattgtttctaatatccaagtggggagaggatggttttactctcaatattgcagggagtgtacactccccctgtgatactgtttctaatactcgggctgggagaaatagtattactcccaatatcgcagtgatattgtttccctgtgatattgtttctaatatctagtgggggagataattatattactaccccatacacaggggagggtgtacattcccctgtgatattgtttgtaatatccagggaaggagaggatgttactcccaatatcacaggggttgtacaccccttttttgatattgttcctaatatctggggggcagagaattatattactgtcaatatcacagagtgtgtacaccccctctgttatattactctttatattcagggcggtagaggatgatattactccctatatcacagggggtgttcacccctcctgtgatattgtttataatatctaaggggaaagaggatgatatcactctcaatatcaaaggaaatgtacacctttcctgtgatattgtttttattatataggggggcagaggatgatattaagaacaataccacaggggatgtacacccacgtattgatattgtccctaatatgtatggggaaagaggacagtgtaactcccgatatcgcagagtgtgtacacccccttgtgatattgtttctgatatacacggggagaaaagataatatttcttccaaaattgcagggggtgtacaaccccctgtgatattgtttttaatatccagtgggggagagaatattactcccaatattgcagggcgtgtacacaacccctgtgatattgttcctaatatccagagtaggggaggatgacattactttcaatatcgcaaggggtgtacattcccctgtgatattgctcctaatatccatgaggggagaggatgatattattcctaatatggcaggggctgtacaccttccctgtgatattgtttctaacatccagtgggggagaaaatgatattactccctatatcacagaaggtgtacactttccctgtgatattgttcctaatatccagaaggggagaggataatattactcccaatatcgcaggaagcttacaactcccctgtgatattgtttctaatatccagggaggtagggatgatattactcccaatatcgcaggggatgtacactcccccgtgacattgtttctaataaccagggggtgagaggatgatattacgcttaataccgaagggggtgtacacacccttgtgatattgtgcctaatagccagggggaagaaaattatattaattttaatatttatggggaaaaaggatgatattactcccaatatcacaggggctgtacaccgaccttttgatattgtttttaatatccagaagagaagaggataatattgctcccaatatcagaaaaggtgtaaaccccttctgtgatattggtcctaatatccagggagggagagaataatattactaccaatatcacagaaggtgcccacccccaaggtgatattgctcctaatatccaaagataatagggtgatgttactcccaatatcacaggaggtgttcacaccccttgtgatattgtttctaacgtacagggaagggagaggatgatattattcccaatatcacaggaggtgtatactcctctgtgatattgattttaatattcggggggaaaggatgatattactccctatatcgcagagggtgtacaccctctgtaatattgatcctaatatccagggcgggataggatgatattactcccaatatcgcagaaagtctacacaacccccagtaatattgtttttactatccagggggaagaggatgacattactcccaatttcacagagtgtgtacactcaccatttgatattgtttctaatatctagggggagagaatatattactcccaatatcacaggaattgtacaccacctctgtgacattcttgtgaatatccggggaaaaagagaataatattactcccaatattgcagagcgtgtacacccctccatgatatcgatactaatatttttttaaagaggatgatattactcccattgtcacaggatgtgtacaccccccttgtgaaattgttcataatattctggggggagagcataatattactccccatatcgaaaaaggtgtccaccctccttataatatggttcctaatatccaggatattacttaatccaggatacttgtaataccctaaatatacaattgcttgaacctccacctcccaggttcaagcaattcttctgcctcagcctcccgagtagctgggactacaggggcacaccaccacacccagctaatttttttttcttgtatttttagtagagatggggttttgccatattggccaggctggtctcaaactcctgaccttgtgatctgcccacctcagcctcccaaagtgctgggattataggcgtgacccaccgtgccaagccaggaagaggatgctctatagatttccccaataagagatggctttgcagggccattccaaaatatgtcaaagaaatacatttggggataaaatactttgatttcctttagggaatgttatctattatgtgatgctataccagagtcaggttggagtcggttatcttattgcaacaaagagtctgttccgtcactgttgggatctctattttttcctcttatttcttgagacagggtctcactctgtcacccagtctggagtgcagtggtgcgatcttcattcactgaaacctctgcctcctgtgttcaggtgattctcgtgcctcagccccttaagtaactaggattacaggtgtgcgccaccacacccagctaatttttgtattttcagtagagatggtattttgccctgttggccaggctggtcttgaactcctggcctcgtgtcatctgcccacctcgacctcccaaagtgctgggactgcaaatgtgagctattgtgcccagccaggatctctgttttaatgttagtgctggtcactttgcatgaactccaaagggaagaaatataatgaggtgtgtctgaccccctgccttctcatcgtgacctgaattagtttttcaggtttgcaggggatacccttggacaagaaggggctctattcggttggttggggggattagaattttactttttgtttacaatatttctcctgaaagagttaggggctcacaaggaatttccgcgtgagcaacttatgaggaaagccatctgggaagatatgtgtccttgtgtcactgggatattctcgtttaccccaatgatacggcaatgacgcagggttgtgaaattacagctatgtgtttggggaaaaaagaaagcaggattgtgtgactacgtttccaaacttcacttgcccttagccatagtgagttgggggcctggagattctgttttctttcacaatgatatagatacaattaaatgtatagaaagcaaaaaaataaaaaggtgagtaatgaggaacctctgattcctgagtggccatgtagttacccatggcacagagccacagttactgaaggtaaagtttgctggggaatttagaaatgaatccagctcttggaggagtcagtttactggatgcctaagaaaatgcaaacaaaataagaaaaaagggtaatattcaatcccatagttattgttacctgtcatagctaaagtaaaattaaaacagagtgctggcttcaatcttgatgctacactaagcttagatttcagtgaatgtgagtctcagccactagctcagagccacctcccaaagaccaaatcatgtagggacaatagaaagtacttctgagaattgtggttaccaagaacctagtaactgttggggaggagcaaaacaaagtacagaaaccagagggtacaatctgagtgagactgctatcagcttctggaggagcctttactaaaatgaatgatgagagtaactggatgatgagagtaactaatggatgatgagagtaagcaatgtctttggttttcttttttttttttttttttttttagcagacgtctcactcttgtcgcccaggctggagtgtaatggcatgatctcgcctcactgcaacctccacctcctgggttcaagcaattctcctgtctcagcctcccgagtagctgggactacaggcactcatcaccacacctggctaatttttgtatttttagtattttctggtgagggtccaggtttccggaaacaactcagagacatatgttaagatgttatctttagttttcacagggaaccaaatatgttacgactccaatttccttggctattgttttaagttaccattaccttctcgttgatcaagttgctcatttacttctcaagcctagctagatgcctggaatttcccttgaaggaagtcaagattttcctttatctccatactggctgatggtgatcgagtaagcccctaagaggggtccctgctccatctcgagatgctgctagattctacagtgcctaataaacagctctcgcctggccgacaaagagctgcttgctctctggatagcaattccaaagtgaacagacaacatcctgtttggaagactgccactctgttagaagaagcatcaggaaaacctttcttttgagctatttataactaacagcaattgaccaagtatacttttgtgagtgaaactgacctttctccctgtaagaattctccaaaatttggaaactatttgtgagtatttttacttatggcaatataattattggcacaagctcaatcagattcggttttctttcgtaacaggaaccattggagatactcattactctttgaaggcttacagtggaatgaattcaaatacgacttatttgaggaattgaagttgactttatggagctgataagaatcttcttggagaaaaaaagactgggtatattttcaatatgctttccttttaaggtccctcacctgtggaaagtaaagaatgtcactttctgacaggctcaggaacctcaagttatgtagggatctcaagaagatgggggaattcacccagttcatacaggtgaaattgctgttgcaaagattatgaatatgagagaagtccagcatggctgacttcatctcgtgtctggcctcaggctggctgcccttgctcactcttgggcataggccaagctagccatgggaggaatttagtttatagtttaactttgaagcacggatgataatagtctctccctaaaatgaaccccttccttgctcagggactgaaactacctttgtatgacaaatgaaagcccacaagattaagattatgagaggggcctgaattctgctaaaatgcaggtgtagctgactgataacaagtcattgtcccacagcttgcctttctataatctcttgcttctcaggagtcacatggccagaggtcctgagatttccagtcctgtgacccccacccagagatggacttagtgcatgaggaccattttccacacccctatgatttcatcctcaaacaatcagcagcaaccattccctagccccctgccttccaaattatccataaaaatcctagcctctgagttattagggagattgattaataatcccagtcctaccccttgggttgctctgatttaattaaaccttctctactgcaataccacggactcagtaaattggttttgtctgtgcaatgggcaagaagaacatgttgcatggttatacaggtactacaagcacagtctgatggcaaattattggttttgcttcctgcccttgatgtttctaaacatctagtccaaaattacttgtgaaaggtccagcaaagccaattttaaaagaggctatatggccaatcactattctttctacacattattgcaaataatcaggccacggctgggcacggtggctcatgcctgcaatcccagcactttgggaggctgaggcaggatcacctgaaatcaggagttcaagaccagcctaggcaacatgataaaaccctgtctctactaaaaatacaaaattagccaggcatggtggcatgcacctgtaatcccagctacttgggagactgagggaggagaatcacttgaacctgggaggcagagattgcagtgagctgagatcacaccactgcactccagcctgggcaatagagtgagactttgtctcaaataataataataataatcagaccaagtataatgaaattaaaatttattttgcaaataaattggtcctactacaatttatccttcatagaaatgtggaaactgaagataaaaaaaattaggtttcagaagaaaactatactacacctgttattagattctagccctaaacattgtttttgaggtttttattatttacctgcaatttggtctaaattctgaattatttcctgactacaagtatccaaggaataaatgggttttctttttctttatgatagttttagttggcttctaatgcaacaacaatttttattgtaatcctgtgtgcattctattcctactattcaaattattaatgttatagatctttcattgtagtacttctgaattaaccaaaatcacagtattctgaagatgattctacaaagcctgctgtttctacaaaggctgctgatgatttctacaaagcctgctgtagtgttgctgtggcctctgcttaaaaaagtagaaaacacattgatgcagcatgttcaccccaacctccctgcctaaaggctcagggaccatcttggaagaggaaggcgcgtgagattgtaagagccgaattagggggatggagtgtggagaataaggacacttcatcttggatgctcacctgccaaattgacttctgatgaaagccagctccagaaatgtgcctacagttactactttcacctaaaccctgcccttagtcaaatccttctcttcttctaagcaatcaacttcaattccttgtataacccacagtataaaagggcttttataccattctatcctattgcatgtaagccttgggtctgggaggtaacagtgtgggattccaccatctcatctccctgccacccaaacatgcctgctcttctttaagcaatattaaatgtttgtacttcagaaatttgatttgtcagcctcttcttcagactctcagcttctttggcctttgggagtaaatttgcataggcctgctcaaaacaggatgttctgggggtttgggggtgttgttttgttttgttttttgttttgtttagagacagggtctcactctgtcacccaggttggagtgcagtggtgcaatcatggcacactgcagcctcaaactcctaggctcaagcaatccccccaccttggcctcccaaagttctgggattacaagcataagccaccatgcccagccctggacttttctttaaagacatttacacagtgtaggaattactgtgggtgcactgctcaggtccccttctccaggatgctcattcctacctcatagatgattttcctgcagagatttgacctcagctgaagggcagtcacctggtccaggtggttgctattcacctccttcctgagaacagccaacagccagggacacgctagcacagagatataagagcgaccaaggtgaggccccttctgtgctgcggtgcatgctccagagcctccctgggatcagacttaagagggtctccagccagatctggtcttcgctgctttcctcgagctccccagcgcactcctgcaatgcatcttttttttttttttttttttttttgagacggagtttcactcttgttgcccaggctggaatgcaatggcgcaatctcagctcaccacaacctctgcctcgcgggttcaagtgattctccttcctcagcctcccaagtacctgggattacaggcatgcaccaccacgcccagctaattttgtatttttagtagaaacgggtttctccatgttggtcaggctggtttcgaactcctgacctcagttgatcctcctgcctcagccttccaaagtgctgggattacaggtgtgagccactgtgcctggcccaatgcacctcttgaatcacctcctcatgctttgcttttagagaacatgatccccaacatgtgattccagcaaagattctagaaagccaaccgtgacaatcacttctgggtttagatgacccccccccaccacaagatggcagtgagcacctcatcacagaggtgctgatggtctgcagcaccgcgccaggccagaacgtgccttttacagaagaaaataacccagtagctgactaggatggtgaggagggctggtgagcactgcggtagtgagagggacactagcatcactgagatgcaagtgatggtcatttttcataggtcaaagctcaaagcaggggacagttacagggcagggcttcatagcaccagtgtgatgaaagtatctgggagtggctaaggccagcactatgccatgggaagcaaggtgggcctgaggaggaggcagcagcgtcagcctgcaacaagtgggggctgccctgcagagacctaagagtcatgttatagagcacagtgtctgtaaggccaagaagtgtggacagccaagtgtgtcaattactagacatactcaagaggagcaggaagggcagggcatggtggctcatgcctgtaatcccagctacttgggagactgaggaaggagaatcgcttgaacccgggaggtgaaaattgcaatgagccgagatttcgccactgcactccagcctgtgtgatgggagcgggactccatctcaaaacaaaaaaagaaaaaggaaaaagaaaaaaagaaaaacctaggtatacttctcaagcaaataaaaataatcaaaaccaatatcatgcccgggcacaaatttcatatatataacagatttaaatatatgagggtgattatcctctcatatctccatttttttttgtttttccatttttttctttactaaaaaaagttaatgccaatgacacacaatttttttttttttttttttttttgagatggagtctcacttcttcgccctggctggagtgcaatggcgtgatctcgactcactgcaaagtctgcctcctgggttcaagcaattctcctgcctcagcctcccaagtagctgggaccacaggagtgagccaccacacccagctaatttttgtatttttaatagagacggggtttcaccatattggccaggctggtctcaaactcctgatctcaaataatctgcccgcctcggcctcccaagattctgggattataggcgttgagccactgcgccccgcctatgtatgattttttttttaattttattttcataagtttttggggaacaggtggtattttgttacatgagtaatttctttagttgtgatttgtgagattttggttcacccatcaactgagaagtatacactgaacccaatttgtggtcttttatccctcacccccttcccaccctttcccccggagtccctgaagtccattgtatcattcttatgcctttgcatcttcatagcttagctcttgaacccttactttctgtttgagggagaagacatatcatctacaagtagatactgtgtaaacattccattgcatgactatcccataacttatttattatttgtgtttggttatttgctgctatgtaacaaccccactcccaactaaatggtgtgacaattccatgattctgtggatcaaaaattctgaaaagtcaaacccaaggagttttgtctctgctccatgatgctaaagcctccgcaggggtgaggcgaatggctcagggtgactgaaaagctcagggttggaacagctggggatgaggcctctatgtataagatgattcttcactcacaggtctgaaactatggtggggacagccagaaggctcggctcagctgggacagtcacctgagccctacacatgacctctccaacatggtgatcctgaagcagttgggtttcttacacagcatcacacttttcttttttttttttttttttgagatgaaatattgctctatcacccaggctggagtgcagtggcacgatctcagctcactgcagcctccgcctaccaggttcaagcgattctcctgctccagcctcccaagttgctgggattgcaggcgcctgccaccaagcccagctaatttttgtatttttagtagagacggggtttcaccttgttggccaggctagtcttgacctcttgacctcaggcgatccgcctgcctcggcctcccaaagtgctgggattacaggcatgagccaccgcgcccggccaaagctcacacttcttatgattcagccttagatgtcacatcagttcattttccccacacttattagtgttagaagtcacaagcccacccatactcaggggactggcacacagaccccactctcaatggaaggggtgggacaccaccattcctgctgatgggcatttgggtaacttcctgtttgaagctattaagattgggctgctgtggccgggcgcagtggctcacgcctctaatcccagcactttgggaggccgaggcgggcggatcacgaagtcaggagatcgagaccatcctggctaacacggtgaaaccccgtctttactaaaaataccaaaaaaaaaaaaaattagctgggcatggtagcgggcgcctgtagtcccagctactcgggaggctgaggcaggagaacggcgtgaacccgggaggcggagcttgcagtgagccgagattgtgccactgcactccagcctaggcgacagagcaagactccgtctccaaaaaaaaaaaaaaagattgggctgctgtgactattctagtaggtgtctttggtgagcgcctacacgtgtttctctttttctctttagtatatgcccaggaggggaactgctggctcccagataccgtatgttcagggtcacacacacttccacagggttttccaaagcccttgtaccagcacgcactcccagcacctgtgtgactgctccagctgtcccacagtctcatcagttctattgctgatattttcattttagcttaagttatatttaataggaaaattaccgttgcctctgccccccgttcctgcctgtaggagtttctcgtagctgttgctacaggtggccacaaatctgtcacttaaacccacacaaattgatgtccttatggctttggagtcagaagtgtcaactgaaggtactagcagggctgtactgacctggtggcctcagggagcatctgtgctgcttctccaccttctagaggctgctgcatccctcgctccagccccttcctgacaccactcaccctcctacttctgttatcacatcctcaccttctctgtgttcagggctccctctgtctctctcttgcaagcacacttgggattccattgagggccacccacataacccaggagaatttctccacctcaatatccttaacaactgcagagcccttttgccataaaagttaccattcacgggttccagggattgtgacatgggtagctttaggagtgattattcctgcctgtctcccgctcaccagaacttggactttctctctcaacaggagccccctgtgtgggaatagcctgtctcaacgacgccctctataaggacctgcttcctcaaaggacctcatagtcgggtcctgcccctcagtgtccagtctgccttggctggaggggctgcaggggtgtgttggcgccacctggtggagacagggcatcacagcaggtgggagcccagtagaagcacaaccaaaacatgggtaatgtttaaaattttctggctaagcgctgtggctcacgcctgtaattccagcactttgggaggccgaggtgggtggatcacatgaggacgggagtttgagaccagcctggccaacatggtgaaacatcccctctactaaaaaatacagaaaaattagctggacatgtggcgcgctcctgtaatcccagctactcgagaggctgagacacgagaatcgcttcaaccccggaggggttgccgagatcgcgccactgcactccaggctgggcgatagagcgagactctgtctcaaaaaaaaaaaaagaagaggggaggcgaggggaggggaggggaaaagggggaatttgtttggagctgagacatccatcttctcctgacctcagatatttgcactcctggttatgaagccttcacacttggactgaatacaccaccagctttcccgatttccagcgtgcaaatggcagatcgtgagacttctcagcttccataattacatgagccaatttatatatataaattgggtcctccagaaaaacagaataaattatatatataattatacgcataacttaattaaattatacgtataacttagctatatatataatttattctgtttttctgaagaaccctactgacacaaatgttgagcatcttttcatgtgcttattggcttaataacttgtacatcttctttggggaaatgtctattcaagttctttgcccattttgtaactgaactattaatatttgtctttacattgttgagttgtaaaagttccttatatattctagatactagagccttatcagatatatttctgcaactattttctcctaatatataggttgtgtttttattttctttttctttttttttttattgagacagtctcactctgtcacccaggctggagtgcagtggcatgatcttggctcactgcagactcgacctgccaggctcaagcaattctcccacttcagcctcctgagtagctgaggttataggcacttgccatcgcacccagctaatttttgtattttttagtagagccgaggtttcgccatgttgcctaggttggtcttgaactccctgcctcaaagcgatctgtcagcctcagtctccctaagtgctggaagtacaggtgtgagccacagtgcccggccatctattttcaatagtgttttttgatgtacacaggtttggaattttgataatgttcaattcatccatttttttttttttttttttggttctttctactggaccaccactcttgagccctctaatccaacctccacgcggcagccagagggagctctctaaatgtaattactctttccctgctccacctgctcaaaacagtgtcacatttgtgatttaaaacagtatttctcaaacctaatttgcaaacaaagcaggtggaactcttcttgtatgcacagcatctgatttggttggtctggcatgggtctgggagtgagcacacctaccaagcggctgctggggtaacttgcgttttccactgatgatttcagcaatgtttccggtcccacatgctcctccagaaccttgtactcccccatgaaaaggtggagtccatttccccttcctttatttatttttttgagacgaagtttcactcttgttgcccaggctggagcgcaatggcgtgatctcagctcaccgcaacctccgcctcctgggttcaagcaatgcttctacctcagcctcccgagtagctgggattacaggtatgtgccaccacgcccagctaattttgtatttttagtagagacggggtttctccatgtcggccaggctggtctcaaactcccgacctcaggtgatccgcccgcctcagcctcccaaagtgctgggattacaggcgggagccaccgcgcccggctatttccccttcctttgaacctgatcaggacttgacgatggcatcaacatggtgagagtgaccctgcatggcttatgaggctgggttacacaaggcgatgttgcttctgactggctccctctcaggatacatgcccttggaacccatcctctaagctccttgggagcccaacttagcccatgtggagacaagacagggagagaaacagaggcacccccagccctcagccagcatcaaccgccagacaggagagcaaatgcgccaacaatgattccagctgaagcctcagacagcgtggagcagagatgagggatccctgcagattgcagatgcgtgagcaaaatgcatgctgtcactgttttgaaacaacaatgtctgggggctgtttgttatgcagcaatagacagctgtaacaatgctgttactgctgtattccatgaatgactgcactttgagtagcagggggctagatcactagataagccccatggcttctgtgtatgctatttttctacttttatatccttttcattcactttttttttttttttttttgagacagagtctcactctgttgcccaggtgggagtgcagtggtgcaatcttggcggactgcaacctccacttcccgggttcaagcaattattgtgcctcagcctcctgagtagctgcgactatagatgcacccccatgcctggctagtttccgtatttttagtagagacggggttttgccatgttggccaggctgatctcagactcctgacctcaggtgatccacccaccttggcctcccaaagtgctgggattacaggcgtgaaccactgcacccagcctcattcactttctttacttggctcatttttccttgttgcctcaattctcctctaagatcactttcctgacatttcagcctgggcctgttgccttctctgggtcccctccgcctcctgtgcctcccccatctcagccttgatccctcagattatacttcctctgtccccaccctgaccatcttggctgtccctggatagggatgggtatcttctcccactggtctgggagatctggaaggacaggcctggaaaagacttggtcactgctggaaggagctcagttagtgtggtgctgaggacagtacgggtgaggctggccccttcacccaaactcccactctcttccatagatttcacctctgtggcccaggccataggattagggcaactccccttaaacatcgagtccatcctccaagctgtccttttttttttttttttttttttttttgagacagagtctcgctctgttgcccaggctggagtgcagtggcgcgatctcggctcactgcaagctccacctccagggttcactccattctcctgcctcagcctcccgagtagctgggactacaggagcctgccaccacacccggctaattttttgtatttttagttgagacggggtttcaccgtgttagtcaggatggtctcgatctcctgacctcgtgatccgcccgcctcggcctcccaaagtgctgggattacaggcgtgagccatcgcgcccggcctcatgctgttcttgaatagtgagcacctgttacaagtcgccccaccagcctctcacttgtacccccctcatctctttctccccaagagacagaggaccctggcacttgtgaagcatgacccagaccctggggccatggcatccaacatcctcattccccatgacccctactgtctagatgtagctgccaagagacccccagactccccgggcctctgtctagagtgccaagacagagagagaatgccctgccgcttgcatgctttgtggggtgtccttcccccttccctggctgctaggcgtgacttcaacgttctccccaacccccaaacagcagcactgacaccagctgcagacctggctcaggttagctaatgaggaccaggctggggatggagcctgaacccctaaaccccagtcctgtaccccaccctaatcctggggtctccactggacaaaacgaagcagcttggtttttcgttgttattgtttttgagatagagtatctctctgtctcccaggttggagtgcagtggcgtgatctcagctcactgcagcctccgcctcccgggttcaagtgattcttgtgccgcagcctccccagtagctgggattacaggcgcgtgccaccacacccagctaatttttgtatttttagtagagacagggtttcaccatgttggccaggctggtctgaaactcctgacctcaagtgatttcccagcctcggcctcccaaagtggaagcggcttatttttaaggagaaaactcccgtggaaaggaatcagcacctcctctgtcaacatttcacttctctgaaaagactctcacttccaacagaaagtgctttgtaacacaacaatgaggctgggcgaggtggctcatgcctgtaatcccagcactttgggaagctgaggcgagtggatcacgaggtcagaagttcgagaccagcctgaccaatatggtgaaaccccgtctctactaaaaatacaaaaattagttccgtgtggtggcgtgagcctgtaatcccagctactcaggaggctgaggcaggagaatggcttgaacccaggagatggaggttgcaatgagccgagatcacgccactgcactccagcctgggcaacagagtgagactccgtctcaaaaaaaaaaaaaaaagaatgagaacatatggacacagggaggggaacaatacacacaaacaaaatttagaaacaggtgaaaataattttagtaatatttttactaatactgatatgctcaaaatattattatttcaataagtaatctaaaaattattgagatgtcttatgttcttttcatcatactaagcctttaatatttggtgtgtattttacactcacagcacatctcaatttgcagtccccatgtttcaagcactaaataaccatgtgtgtccggtggctaccatactggacagcgttgatctgaaatcgcatctgtatgcatcaccagcatatttgcagagatccccatctcagcagcacacctgaggctcatctgcgaaagcacctgcaacttctctacaacctcccacatcacctccaaacacatcctcatgtcatctgcaaacacacccatagctcacaggccaatgcctaaatatcattgcaggcaccttcagagaaagcacttactaaaggggtatacttgattccacatctgctttgacctgcaaatctcccttctcctttacatacatttgcatctcatttgtatgtcaatctaaatccactggcagagcctcagatcatcatctcaaagtcaggtggatgtggggctgggcaggcctccaggtgttcctcctcctgcttcctctggggctcttgatcctcctcctcttccttgctgctctcctcctcctcctccaatatggtgaccagttcctcccgcagcgcccccatctccagccccaggctgcacagctgtcccagcagctggacatccactcggcgcaggttcccctgccagtaggaaggggacgtcacagggatgccaccccagagagcaaggggtctctccaggacctgggtgagagcaggtcccaactcatgtcctggccacagcgcctgggcagggtcctcactgtgcccatggaccctaactgccttcctgcttctcagagtgtctcttgatctctaactcttctctttgtctctccatttcattgtccctgacttctctctctctgtctcctccctctcttatctatatctgtccctgtttccctttgtctctgtccccatttattttttgtctttccatgcccctgtctctctgtctttatgtgttgccatttctctgcccctgcctttggctctctttctctcgcttgccctctctctgccctccccaactttctcaaattcagtctgtctctccatctctgttcctgctctccgtctctgcttcccacctctgtccctctcttttgggatctccctgtccccacctctgttcccgtccctcactctatgtctgtctctcggtgtctgtacatgcctctcatgtctctgcttctatctctcagattctgtttttcgatctctggccttctctatttttgttcatttccattcattctcatttcctctctttctctttcccttccaaacccctcactcaccagctcctccctgatccacagcagactatcgcaggcacctccagtgtctgcccctgcagtcctgagggtctgaccagggatttccactggggagacctccctcagggcctgggggggtgggcccagccccggaggcaccagtccagcctgattcagctgcctccacagttccatcgtctctgagctatggctgcaaggagcaggaagtagcaaggtccagggtggcctggtcccctggggagctgtgtgcgtggtggagagtaaagggcagagggagtgggatgggggttcctgggaaaggtatcccaaagtccactcttcagagagaatcagctggccttgtgcttttctttttccttctgaagtctaacctcaactctgctcacagggttcaaacatagcctcttgcagaggtctaactccacccttccctgcctgtctcaggcctgacccctcaggggcgctcagtgtctgtagatgcctggcaccctctgtccttccacctgccccccaccaccacttctccagcctctcctcagcctccatttgacctctggcttgcccatagcttggtccttgcttgtcctcttggcacgggtcatcctagggctttcccaccagtgtgcctttgggggcaggaatggctcccaggggcaccaagacagcaatcccttagctggagtgcctgtgtccaggctgctggcctagggccaagcagccaattctgctgaccctggacttgcctatgggtatattatccctgttgagggtgagggcttctgctgtggaaaagtctgggaagcactgcaggcctctctcggccttggacccttccttcagacccaaggtgcatatatatacatatatataatggtagatcacgaggtcaggagatcaagaccatcctggccacatggtgaaaccccgtctctagtaaaacacaaaaaattagccgggcatgctgccgcgtgcctgtagtcccagctactcgggaggctgaggcaggagaatggtgtgaacccaggaggtggaggttgcagtaagccaagatcacgccactgcattccagcctggcgacagagcaagactccatcttaaaataaacaaatgaacaatatatatatatatgtattttgttttttgagacagagtctcgctctgtcatccaggctggactgcagtggtgcaatcttggctcactgcaacctccgcctcccgggttcaagcgattcccctgcctcagcctcctgaacagctggggttacaggtgcacgccaccacacctggcgaatttttgtatgtttagtggagacggggtttcaccatgttagccaggctggtctcaaacccctgacctcaggtgatctgcccacctcggcctcccaaagtgctgggattacaggcgtgagccaacgcgcccagccccaagtcccttttaccatagaaagtaacatagtcacagtgcccagggattcacaggtatggggagagggttcgttattcagctgccacacccaccttcctaaacctgctgcccttccagtttcctcacgtgcacagccacgcccgtctgcttttagtttctcaatctgttggcttaaccttcaaaacaggcccaggatttgagcacttctcaccattccctctgccccatccccattcatctcttgcctagactgctacagcagcctcttttactggtcccctgcatccacccttgccctctaaggcaagggtccccagtccctgggccaaggaccagtaccagcccctcgcctgctaggaactgggccgcacagcaagagatgagcagcgggtaagtgagcattaccgcctgagctccgcctcctgtcacatcagcagtggcattagattctcataggaggcaaaccctattgtgaactgtgcgtgcgggggatctaggttgcctgctccttatgagaatctaatgcctgatgatctcaggtggaacagtttcatcccaaaaccatccccaccccacccccgacccccagtctatggaaaaattgtcctccacgaaaccagtccctggtaacaaaacggttagggaccgctgctctaaggtacattctccacctggcagaaataatctttacaaaatgtaaatccgattttgacactcccttcttcccactgtgaatagaataaaaccctaccaggcctgcaccgtcagcccctgcccacctctcaacccagtctcctatctctgtctgcaagctggttcccacctcaaggcctctctgctctagaggctacctctccctgcagcgcttttcccctagatctttgaatggctctttccttatcattcacttctacttcaatgtcacctcttcagagaggcctttgctgatggccctacacccagtcacttttttttatctgcttctcatcaaaattgccttgctgattcctttgtttcttattcatcctctcccacatccatcctctcccagcccagaatgttgacttcctgagagagggactgggtctgtcctgctcaccatggtaacctcggcatctagaacagtgcctgccatcacgtggtaggtgctcagtaaatattcttggaactaatgaatgaataattctatccacaagacttcacaatggctcttcatgctgcgatctagctttcaactccaaactggtcttgagatctcacctcagtctctaaccttgacatctaacctcttcacccactctcttacctgaccctaatttttaaaaatgacgtggtcagcttttcagccccctcattccctgtttttaggaggtagtgagtggaagctggaagaataagaaagcttggggagactgcaattgcagtcaggaaagaaaggtactctgccgggaagaacaccccatcttctcctagggaaagattgtggagtcctggggtttgttttgtttttcaattttttgttttaagagacagcgtctcgctctgtcacccaggctggagtgcagtggcgcaatcacagctcactgcaacttcgacctccccggctcaagtgatccccccgcctcagcctcgtgagtagctgggaccacaggcgtgcaccaccacgcccggctaacattttattttttgtggatataaggttgccctatttctttgtggagataaaggctcccctatgttgcccaggctggtctcgaactcctggcttcaagcgatgctttcgcctcggcctccacaaagtgctgggttcacaggtgcgtgagcccgacctgtgtctcgttttgaagctcagggagagggcgctgtgagcaatccctaaaccctttaagagtaaaaagtgcgtgcacctttaagaggacggttagaaaacgcggggcgtggccacaggagaataagttcgcgctgaaccaggagcgtgggataagaccggccccttccggttacgaaaccttagcaagatggcggctccctgggcgtccctgcgcctggtcgcccccatgtggaatgggcgtatcaggggcatccatcgcctgggtgcggcagtggccccagagggcaatcagaagaagaaaaggacaatactccagttcctgaccaactatttctacgatgtggaggctctgagggattacttgctccaaagggagatgtacaaggtgcatgagaaaaatcggtttcgagacaaggagtggatcaggccagataagtatggccatttctctcaggagttctggaatttctgtgaagtgcctgtcgaagctgtggatgccggtgactgtgacatcaactacgagggcctggataacctccgaacctccgcaggctggacatctcggacctccctgccgtgtccaaccctggcctcactcagatattggtggaggagatgctgcccaattgcgaggttgtgggagtcgactgggctgagggcctgaagtcagggccggaggagcagcctcgggacacagccagccctgtccctgcctagcctttagccctgtccccactcacgtggcttctcagcgggctgcatggaatgtctggtagctcaccacacttctggcttccatttgtcttcactcaacgtcagggtgggggagtggtgctggccaatcacaggagagagcgtgagttcccagtatttattcctggctgcccttggctaaaggtcacagctcctgtcaccctgtcaggcagccctttccatgcccctgttcaggcctggggaggtaaaggctcaggctgttagtagccgcagagagccacactcaccttgtcaggagactcttctcaaactgtccttatgtgagtgcactgccatttcttgcagggaccctgactgacacaggggctactactgacactttacagggatggttctcccccgtgcagggccgctgtgcccactgcaggacatgcagcatccttcgccccactccactcactaaaggccagcgcaccccaggccccatagtattgctggttatggatttattgactttatgttccaaattcagctttttcagttggctgttttttgaaaggggataagctttgtcagtagagggcaccgaacaggcattataggaggaaaggcgcctccttcgtggttcttgttggttgtgcttctgcctctggacgccgcagtgcatgtggcttccccagcacccagctcctgaagcaccaggcggtcagcagctgcccttggcaccctccagccctcagaagttgcgtaggagacacagcgcctccactgaggcacctctctgggaataacgttccccagcaccccaaatggatttccagtcaattcagaagcattttaccagtgaagccctcattattccagttcactgttaaagccagtaattctctatattaaactttccctgttcggtttatactccggagtataaaccgaacaggggtggccaagctgctgtgggccgccgccgtgcagaaccgctggaactcacgcttggggcgacggctacagttggattttgcccctgcaggcaggttcggtgtcgatactggcgttgatagcgctgctgccgtttgacgtggcgaatatgggcttgtttctcggcctgatcgccgtgttgtcgtagttcgcagccacccagga

SEQ ID NO: 735332 - DNA, 188261 bp, Homo sapiens
ctccaaggctgagggatgaggagacctgctgaggacccagggccttatctttccatcccactccataggtcccagtattgactgatgctgtcttcacctcctagcctcacttttaaccttctggcacccgcccaccactgtccagttcactattgaagccctgccgtccagtgctgcagagggaaaggatgttcttctactggcctgcaatatttcagaaactattcaagcctattattggcacaaggggaaaacggcagaagggagccctctcattgctggttatataacagacattcaagcaaatatcccaggggccgcatacagtggtcgagagacagtataccccaatggatccctgctgttccaaaacatcaccctggaggacgcaggatcctacaccctacgaaccataaatgccagttacgactctgaccaagcaactggccagctccacgtacaccgtgagtgattcccccatacctctgggtgctggcggtcagttctgcttcacacacatgagattgtcaggcctgggctgtgcctgcatccccctctgcattttgtcccgtgttgagatttgggcatttagtgcaggacacacacatggtaggtaaacttcaacagatcagaattcctttcctgcatccaggccctgcagacactgatggcgggggcgggggggcctcagcagggggaggtcagtctcagccaagcaccccatgccctccccatgaacctgaccctgagaaagaccctggagaactgggtcagggcctggcctgagggcgtcctgggaacctcacaaaagcccagcctcaggactcctgactccgtgtgaccccgggaagcctgtgtcagggctggggtgtggtctcctgggcagggcttactgggagcaaggatttaccagatgtctgcgggctgtggttcctgaagcttctcatcagtgagggctcagctcccagagtctcatctagacaaggacagagcctaccactttccctgggactcagcctggagagggcagggggacaggattactagggcattggccccctgaatgaggagcttaagagatgcccttgggcagtcagtggcccaggggtaggaacagaggggagaaaatgttcctggcagcttcttgtccaccggggatcatgcccaggggtgctctcccatggaggcaaataacagatgctgttgatgtgaacacctcctctgtgccaagcttcatgtcagatcctgtgaataatttaaagttcattcacagacaaagtggcaagcctcagaccattttccatttacatattgtatggaggggaaactgaggcacagagagatacagacaccggccacggtgggcagatcgcagctggcagagtcacatgagggctgtctgcagctgctgccacgtcctctccttcatccctggtgccttactaggtgtctgtggaccttagaacagccactggttcggatgttttcttcttaggtgtctacagctcggagggggagattctggtctggagagttatgagtaaatacagaattaatcagttttttcttaactaaatcacctgcctcaacaatcagtcagtgctggggaagttcaggcctcctcgctcaggtccacaccccgcatctctggacatgaaatggcttcgtgtgttttctgatgtgtgggtatcattccaacaggaggataaaggggaggactttgctttctctccccattcacaccctgcaccagccagggcccagtgtgagacacatactccgtagttctctcatgaaggagggagggaatgaatgaaggaatgatctataacctcttcagagacagagacctggatacaagatcctaggaggttctgggcccaacgtgagacacacactctgtagttctcttatgaaggagggagggattgaatgtaggaatgatctataacctcttcagagacagagatgtggatacaagatcctaggaggttctggccacacctgttttctgtccctctagagcctaagacccatgtctcattcatctggcccgtttctcctaaatctgcccctgggagctgagtctcatctgaccctggggctgcagggctgtgggaaggttttcaggggagggatcaggcttgcgggtagtcccacacgtttgccttacaccctggagctctacctggttctcactatgaatatcccataataatcccccctatcctttctggggagtagaaaaaaagtaaatatttaaaaatatgccagagcatctgttcttcttagcaagttcagatagttattagttagcaggaataaatcgttattttaccagagcctcacctgctgggggtttatgggagcctaactgactgaggggggtgggaaatatccaactccagccccctctagccatcatgtcccacctaaaggagagaaaaaactgagaggcacttgtgacattcacagcccagggcacagactctatccaggaccacagaacccctccctccccccactcaccaccgcatcactgaacgcctgctcacccaagttcctgttgcccagtacatcatgtcctggctttcaacaaaaactacaagacagactagaggcaaaaaaaaaaaaaaaaaaaatgcagttcgaaagacagaacaagcatcagaaccagatgcagatgtggcagggatgtggcagggatgttgaaattatcagaccaggaatttaaaacaactctggggccaggagcggtggctcatgcctgtaatcccagcatttgggaggccgaggcaggcagatcacctgaggtcaggagttcgataccagcctggccaacatggcaaaaccccgtctctactaaaaatacaaaaaattaggcaggcatggtggtgggtgcctgtaatcctagatactcggaaggctgaggcaggagaattgcttgaacctgtgaagcggaggttgcggtgagcctagattgtgccactgcactccagcctgggcaacagagcgagattccatctctaaaacaaacaaacaaaaaacaatactggctaatatgctaaaggctgcaatggaaagcatagacaatgtgcagaacagacggatgctgtgagcagagagatggacaggctaagaaagaataacaacagctactatatctatctatctatctatctatctatctatctatctatctatctatctatatatatgtatatatatgctagagatcaaactcactgtaacacctggatctcagagtggttgtgaggatgtttattaggagattaaagagattaaagcagagttatacacagggcgagagctcaactgatgctatcaactagtattcttatttttttgatgttgttattggcaataaaatcaggaacaatgcagtaaaaatttggttttatcatgtacgagttctgtgaccttccttgacttactgaggtactgtaagtctcagattctaactctgcagatggcggtgatgcccctctccctcaaggtgatgtgaggatgagatgagctgtaggtaggttggtgcccactgtgcctggcacatggaaggcccctgaaaatagtcaatgaacatcatccccgctcatcagcatggagttgacagtgagggctcgctctctgtgacaatcatggaatggaaaagaagaaacaagaggaagactgggcgcagtggctcatgcctgtaatcccagcactttgggaggccgaggcgggcagatcatctgaggtcaggagttcaagaccagcctggacaacatggcgaaatttcatctctactaaaaatataaaaattagcctggcatggtggcacaaacctgtaatcccagctacttgggaggctgaggcaagagaatcgcttgaacttgggagatggaggttgcagtgagccgagattgcgtcagtgcactccagtctgggtgacagagcaagactccatccaaaaaaaaaagaaaaagaaaaaagcaacagagggaagaggtgtgacatgagaggaagaagggatttaaaggtacaggagcagggcgaggtgcaagcacctgtgggagaatgtaggagttggtacatcccagtgtgtcaagtctgagacacagaaaatggtgcaaccgtggagagcaagggagtcagctatgaggacagcccaacagaccacactcaggctctggagcatttccttcctccctgactatgcccctgccctgcaatgccccttatggtttcccttggaacaaacttgggccttgtcccctttgccttcccctttctgcagaaaacaacgtcccaggccttcctgtgggggccgtcgctggcatcgtgactggggtcctggttggggtggctctggtggccgccctggtgtgttttctgcttctctccaggactggaaggtaccgcagcttttccccagcctcctcccacccctaggctgaccccagtcagggaggagggagaccccgccctgtattcagggccaggctttccgcatcctcccaaggaatccttccctctcattccatggctcctcccttgccagctgctgatcctaggctgcctcttcctttatgaatgtggcacagttaaggttgcacccctgagtgctgtcctagttccctaacacagcaaagccacagctgcctggagggaggaagggagggagggagggagggagataagacgggagtgctcagaacctggtaccttctgctgttcattgaatttacccacccagtgaggagggatttgcaggcttgagatccatggtgggggtcctgggcatggtcacgcagtggggagtggcaaagcctggacaggctgggtagggtcagcaccccatcgtgattgatgtccctgaggtgtgagatgggagaacctggacctcaggacctgctgtcctttatgtctcttgccaaggggtggagagagagaggacaaggccattgccccatttcagcatctccaggcctgaaaggagggtctggccatggcagggatactgagttctgggagaatatgatacatgctccttgcctccccatgcccccagctcccccagtgtcctgcacacacagccggccctgctttccctctggggccttgacccttcctctcaggcaaacgcaggtggtctgattccctccctgagtcctcagtccctttcctgggtccctgggtcaatgttctcctcacccggcatctgcctgggggggtccttcctctctggccaggacagacgtgactgcttaaggcctatcctcagctccccgtcctcggccgctcctaccacgaaactgatggagacaggaggccttcactccagtccttgaaaatggagtcccttccttgtcctttattctgcccctaaacctgtgatttctccctgcaccctcatgaataatcctgacctttcctagggccagcatccagcgtgacctcagggagcagccgcccccagcctccacccctggtgagtgtcccttcagcccaggtgtgggagcccctaggcctgccctacggtgtccactcctgccagtcaccccctgggggcctctgaccctttctttggggctgcaaggaggatgtcaggaaacatgacacaggggaccccgactgtcttgttcagactgatctgtgggctctgggtcgtgggtcacctcctcgacctcagctgctcaggtctcccctgggaagaggctccctctccctgattctctgggagctgaggacccctacactctcctgcaggaggggcccaggctctcctcccaccctgctgctcactcctgtctctgtccccaggccatggtccctctcacagatccaccttctcggtaagcctgttccctccccagcccttttctactggggtcccaacagtgcaggctcagggcagggggaccatcaaccccacagcacagcactgacccacctttccccagaacagtcaggtcaaagtgagtgcctccagccaggatccgggcctctctacagggccaggaccacccacgccatgtgctgacccctccccgggaccctctacacctgaggagaaccctggagtccagcaggtgcagaatggacactgggaccatcagtcagaggcccacattaacaagggtgcggggtgggcccagccaggacaggggtcagggtgttgtgtccacactgggaggctgagctcaggggcagagctggtcaatcctgaggggaaatgagtggaagtggaggcagggaagtaagtcctggccgatcagagacaggaaccttccaggctgggcttccgtgaccctccctccctgtcccctgacatctcctctctcccctgcccaggcccctctacccagccccagaacagccactcccatctatgaggtgagtgtgggccatggatgttctggtcccgcaggctccaggggacccaggatctgcccccaccagcacctggctgagctcagattcaggaaaatgcagtgaaaatgagaacaggtggtggtgagcagaggagggaggggcctgggaacagggaccccctgagcacagccaggttcagccccagagaagccctgggtgggcccagagcctgggagatgccagacactgttctgagaaggctacaggggttgaggcctcttctctgtttttacaggaattgctatactctgatgcaaacatttactgccagatcgaccacaaagcagatgtggtctcttaggttcctctgggagctgctcttgtgggttgatggagcgtccccaaagctcccagccctggggacggggaaggacatggagcctgagccagagaaccagctctgagtcctgaggagacacaggcctggggacagggagggatgggagtccctgctgaatatctggagaccctgacaggttgccctgggctctgggtgggccgggacaaaggcctctcatcaccacaggaagcgggggcttgcaaggaaagtgaatgggcctgtggcccacccggggtcaccaggaaaggatctgaataaagaggacccttcctctcattggctctttttctgctcacgggaacttagcagaaactcacctgaaactccgtgtccattctctcccgggtcacacagggaaaatatctccaccttgtctcaaccacagtctctcttccctgggaggcagaaataggggttgggagtcaggctggggtgggccctacacaggaaagggcaagattcacatgagccctgcccagccagccgagcgctcagctgtcctcacactaccccagggaccaaggccatgcacagccccagcctgggtccctctgtgaatgcatgtggggtctcaggagcacagaagatggggccatctgatgtccacaaaaggtgagcaatgcgggagcaaccatgggtggtataggttgcggctgtggcccctacgcagcctccagtgtcctgacccctgctgccctcttcacccaggccctggaggcccagtctatcactgtcctccacaaatgaacttacctgtccccaaatccaggatcctgtgtgcttatacctggccactaggttctcctctgtcccagtggctactgctcaggacatctttatccctggtggggcacagagaggggctgtcagagcaaccaagattaatacagacgcataattcagtccttgagcactacccaggactctggcccctcattgctcatcagttcccactttaccccctggcatggatctcactgagcaagccaactctttacacaggagcatccaggtcagaggtgcaggactcccccatctaaagctcatgcaggctcccatggcgatgggacaacctgtctgctcctctccctggcccacagccctatctcgcctgcagctcctccacacacctgggacagcagttctcagcccttccctgagggcccctggaagggtgatgatctcatataggttcacttgaaccaggtgccaccttcccacaagtgagctggtgcctgcactaaagcacagagccacagttcccaagagtgttctgccactgccacaggtcccaagagtgttctgccactgccacaggttgttcgtcctgagatgagaggtaagaaaacaacccgcaatgggttgttttatatcgggatttgcatcaggatttagctctaaatgacccctgatcccacctgcacacagcgtcagatgagacaaggtgaggcctctttagttttctgttgaggctgtgacaaattaccacaagcttagtgacatagaaacctgaaccaaagtgcccacatggctgtgttctttctagaggctccagggaagagtgcatttcctctccttttccacctcctagaggcctcctgcaaccttggctgtgtcctctttctccatcttcaaagccagcagcacagcatcttgaaactattctgtgccctgcttccatccccacatctccacctcctcccacctccctctctcacttaaaaggaaggagccttgtggttattttggacgcacctgggataaaccacaacaacctccccatctcatgatccttcctttaatctgtaaagtgtcctttaccacgtgacatgtccacagatctggggatgaggatgtacacatctttgagaggcccttgttctgtccatcactcctctcaaggccatcttctcatcatcgttcactacaaactacacatgggcacctggatgggttcatcatgactgtggcgtcagttcctgcattaacatccccagcaccctccagatcctgagagagggagacggagggctctccatgcccctagtacctctccaccttcttcttggtgacatgcttagttgctaagaataacagaaagcggaggtgactgaaagatcacaactcaccggcccttcaatagttcgtggacatcagcaccacggacagtgactcagtgaggctaatttccaggtggcagcagggagcatgcagataggagggaactgcaggaaaagctgcccattctattctatatgagaaagagtgtaagaaagaggaagctattacagggataatgctattcttctctaatccataaattgcgaaacctttgcatgtctggatatcatggtttttagcacatctgctgccactccctgcagggctgattgctgcatccaggatgtggtctcttggggggctcacagcctgctttggcctcatggtgagtctccctgcccctgacactcaggccactgtctctgcctacaacatggtgggaaccttccatgattaacgtctgattctctgtgcctgacctttgaagcacatccatcactcagcctggagcatccgctgagctcagcatcctgctcctccatccccagctgagcccttgaggagatgcttgagaggatctcctgggctcctctgtgagctcctccaggctgagccttgtgcttggtgtcagaggcctttgccatctgcttgttctttccataggcaaataatcctcctcagggacaagtggggcctgaagatctgtctgaatatctatctatctatctatctatctatctatctatctatctatctatcatctatctatatgtatgtatatatgagaatgctttattaggcaaaactgcatactatgaacatgctttaaaatgcaacaggatgagatgtgaagacataaagaacaagtgtgtagtgacacatggctatcagaacacactgaagaatccacaccgcggccgagagcagtggctcacgcctgtagtcccagcacttttggaggctgaggcaggcagatcacttgaggacaggtgttcgagaccagcctgaccaacatggtgaaaccccatctctactaaaaatacaaaaaatttagccgggcctggtggctcatgcctgtagtcctggctgttcgggaggctgaggcaggagaattgcctgaacctgggagacacaagttgcagtgagctgagatcgcaccactgcactccagcctgggagatagagtgaggctccatctaaaaacaaaacaaaacaaaaagaatccacactgcttccccgcttcactttacccagaaaaggaatgttctaggccacttcctcttcagcacacatccccagggaactaaaataggttcacagtcacccccatcttcctcattcccatcacctcttacccacagaggcatctctggtcctacagatccagccctgccttcaagaggcacaggtccaacccatccagtgtccctgctagtcacacacagcactcagggtacaatggagggcttctgtgctttggatgggaacaaaccccacctcacattcccacacctgagaagccaccagggtcctctctgtcctgtcctcacactcaatgtctgtcctgggtcacccttgtcatctctcctggaaataggcatggctcctgacaggtaggattgaggctttgtcttttcaggagtccctcccactctgagcacatgaaactgctcagctccatgcaaccctctctcaccaggggccttgttctctgggtccctgaatacctgggtccatgccatgtacattttaagaaaaatgacagtgactctcaccctgacatcctcacccaaggcacgtgtctgacaagaatcaccaggtgagatacctgtggctccacacacctgaggcttcactgcgcaggggtgtcctcatccctctcctcccacccctagggacagtaagcaccacaggctgccttggaccaccagctccccctcccagacacagcctcagatctatactgacatgctacatggagaggctctgatgaacagcaggtattaggaaatcccaccgaaccaggtgccacttgcggccccactcctcctcatatctgtgactgggacagacacacataacacacctctgttcaccgcccagcccccaaggtcaatcacagtctgcttctcccctagatccactgctccccatgtcttccgtcctcagctgcatcctgggtggcctccttgctgttcttgtaccccagaggcaggttccaacctttgtgatgttgcctgcaatgcccaaactttcccttccccttccccttcccttttcccctcccccttcccctccccttcccctccccacccctatcccttcgtcttcccttgtcttcccttcccttccctataaagccaaacatacccatccacctaccttgtggtcaaagtcatcagcctcctgctccactcagtgttctctgaccctgcatatggaggtggtggcccctcctagaacacccaccactcactgtcagccttgcgtggtaatcacagattttgcaggggttacctgtgttcaggtgtgtcacctgtggaaccagaactcttggaaggactggcagagggagctgcttaggatatctcagggctcctggcatctggtctaccacagggctattaacaacagcacttagggacaaggtggaggatggacggttaagagggtaaatatggatgatgtgtgggcaaagaataggacacaggaacacatgcagtactcaaataattatgccaagaaaggtgaggacatggagatggacattcccatatacttctgatgggactgcagtttagtccctacagcaacattgacctcatcatgtttaacgcgcacacgctctgaccactatcctacttctgaaggcctccctgtgctgtgagctctgagaaggccaagcttgcctgttctgtctctgctaaagccagagaccagccaatagcccagcacagggtacttcataaatacatgttgaaggaatgagctccaggaacagtactccacatggtagagatgtgtgtatgaggatgttcactgcagaaggtcatgtcaatgtgacaagtgacgagcagcctcaaatccagcaacaggggtgtgggtaaaagatcatagtgtagccatgcaatggaaccaatgaaaaaaccacaattagagcaaatccacatgtattaataaaggaggtgccctccatacatgctgcacctaacagaatgttgccaaataagaatgaaaaatgatgatatttgggctgtaaaaactagaagtcagctaaataagaatgcatcgaaagtatttgtgaatgcttacaattttataatgccttggcatccgttttggatggaagttggactttctcataccagaagcagggctcagtcacctttgaaatagtttccagttctccacctccttccagttcctcagtgtgattgatcagatatctgatttatacaactgcctcctggtgacctcctccctatgggacttccggatacagcccgtatgactgccccactgaccccacaccctgcctgctgcagtgaccacctctaattacctggatctcatgtctgcttgcattaaatccaccaattaaaactccctgaggacaatctgtttgaataatattctgtaccctaataaaggccttgacccatgggttccccctctgtcctccccatactgcccctgacctctgtgtgtgtgtgtgggtgtgggtgtatgtgtgtgtgtgtgtgtgtgtcctccagacagggcctgtatcccccaggacctgtaagtaataaatctttattttcatcttatgtctctcgcaatcattggcaagagctctgcatcttaaagatcgcaaatttaagaaattggtgtagtcggcacaatagagtacctcttctgtttagcacaagatatctcggagctgctgaggcttttaacatcctcgccggtgtggctgcctcactggtgaggccgttctgttcagtgcaattcagttgctccactgtgtgctgctgtgttgctgctgtagagtgctgccatgttgttctccccaaattgttaccgagtaggaacctgtaatgtgctcccaaggtggtctaccccatgagaagggggattctccatctagggcaagggctaggtgtgtttctggaatcctaatagggaaggcatccacagagggtgaactccactcctccttagagtgaggagtgacatttcccatttattttccccatggaggtgccatgtattgactttttctttcactgtcccaaggttgagccaaggtgagctatggagaccagggcaagataccatttctgttagcaaagcaaatgggtgacaacgtgtggagaagctgtggttctcctgatggatatagcagagtgccatttagtaaaatcttgtcaggaggctgcccctggttagaccggcagtgtctgtagtcactaaggtggatgcgaattttaggccctgggccatggataatccctgcagacacagccgtggcttcatgtgatggggcaatcccgggctagtggctcccttgtttctgcatttcttgctgtggttgcacaatcaacacctcaggggttgattgggtcaccttggaaagagaaacagctgcctaggaggctggtgcacatggaggccaccctcaattttattctgctaacaagttgtaagattaaaacaacagggggctttgggtaccatcaggaacttgtcaagtaaacatccaaagacagaaagaagaaaaagaaaaagacattaaccgtctagaaatacaagccattttaaagattttgcttaaaagatgcgcttgggctgggagcggtggctcacacctgtaatcccagcactttgggaggccaaggtgggtggatcgactgaggtcaggagttcaagaccagcctgaccaacatggtgaaacctcgcctctactaaaaatacaaaaaattagcagggcatggtggcaggtgcctgtaatcccagctacttgggtggagaatcgcttgaacccgggaggcagagacggcagtgagccaagatcgcaccactgtactccagtctgggcgacagagtgagacttcatctcaaaaaaaaaaaaaaaaaaaaaaaaaagacgggcttgtttcgtcgttgtggagtcatcccagagagaggctactccctagagtcactgaccacctttcctcctccatcttttcctcttatcattctagagacagaaaacaagaatctcagctttaggtggctaacctcaccccccaagaaaagaaactaccactttgattgactacaaatccaagaaaaataaaagagaaactttaaaaagtactgagcaaaccacaggtctagcaaacataatgctagccctaggttacttattcatttacaacaaacccctagatataggaggaaaaaataaaaggtaattaaatatatacacatacaatattttaatataaatatataataaatagttaaattatgtatgtataatatgtaactaaatcaaagtaaaatttcatactttgattctattggaaattcaaaattcatttattaacttatatattaaggaatttatgtaaaaaaagatttttaaaagggcaccaatttgcttttgtgtctctacaacataggatctaatttaactttacatttgctaaatacactaattgacaaatattcatggatttaatcaatactggggctcaaattgtagccacacgtgggaatcccataaatttaaacactctgtccctattatcttgagaagaaaactaaatataaaattgaaaaaaacaggtatgtctcaatttacctgtaactttgcctaaatttcccggagtcatatacccattgctgtaaaacattctctattggacataggtgctctgagacaataaataaaatagaagtgtttttggtacttagacattggcttgacaaaatgggatcccatgaaacctcagttaagatagtgaatacggcccaatgtgagttgaaatggggcctttaaggattaaaacttattacatgaaacctagtaagtaatggggtgattatccatactgcttctccatttcatagcccaattttgacagttgtcaaatctggaaaaaacaaacaaacaaacaaaaaaacccctgggaatctgttgcctcacagagacacaaagtagacatcaaaattgtatatctcagttccagttccaaaatggtggcatagaagcaagctggctttactccttcacacagaaaaccaaaaacaaatatacagcaccaaaattattaccagatatattccagaactcaaatatgaaaatgaaacagttttcagagccacagagaagtgaaaaaaactcccgacagatgacaaaagaatcagatttccccatctgtaatgtccctccctgccccattctgcctggtaccaggtgtgtggaaaattttaccccaactcatggtttctacactgggaaatgtaagatcaatgcgggcaaccagtttctgcacaatcctgggttccctgtccctgccttaacccacaagaagcattgtgagtgcccgaagggagaaatttccctgaggacagtcaaagagtggggaggcaggactaccatctccttccctggaaactctgctgtgtaactcagccaagggagacatgaaatcagactggtgtttcagcagctccatgttgtagtaggtttgtttcacaggtatcctgggcatggacatctagccagctttcccacactgccaggatatcccctttgggacctccctcagttaggaagggcacactctgatcatttactagggccaaggtaaaccctaaaggtaacttagagatgaaaaggaggtagtgacctagcagtaaagaactctaagaaaatctatccaataaaaatcaaaacaagccagacaaagactaaaataaataatgaatccttcaatgtaaagacctggacttacatccacaagaaacagtaagcaggtaaccatgatctccccacatggacaaagtgaggaacaagtgactgatcctgatgagatggtgatgtgtgagctctctaatcaagaattcaaaactgcagttttaaggaaactcaatgatcttcaagaaaacatggaaaagcagttcagaaatttatcagagaaatttaacgaagggattgaaataatttaaagaaaacaaacaggaatcttggaattgagaaatatatttgctgaacaggaaaatttattagagtctctcaacagcagaatggatcagaggaaagaatcaacccaaataagactcccccaaggcataaaataatcgaattctcaaaagtcaagggcaaagagaagattttaaaacagaaagagaaaagaagcaaatggcataaagaagctccaattctgtggcaacagattttcagtggaaatcatacagaccaggagggagtgacatgacattctcaaaatgctgaaaaaatattgacatttgagaatactttatccagtgaagttatccttcaatataaaggagagagaaagtttcctagacaaacaaaagctgagataattcacaccatcagactagtcttcctgtaaatactaaagggtaaatactaaatacttcaatgtgaaagtaaaaaaaaaaacactaacatgcaaaacaaccacaacaacaataacaacatttgaaggtataaaatccactggtgaaattaagtacgtagacaaacccagaatactcaaatagtaattgtggaaagtaatccaatcataactctagcatgagtctcaaaatataaatctatcaaaaacaataatacattttaggaggccaaggttggcagattccttgaggtcaagagttcaagaccagcctggtcaaaatggtgaaaccccatctctaccaaaaaatacaaaaatttgcagggtatggtagcacatgcctgtcgtttcagctatttgggaggctgaggcaggagaattgcttgaacccaggaggtggaggttgcagtgagctgagattgcactactgcactccagcctgggtgacagagggagactctgtcttaaaaaaaaatagctacctgtttggagaaaggtaatataaaatatgtaaatagagacaaagtcaaaatttgcaaaggatgaaattaaagagtagagtttttttggggggttttctgtttctattattttatttgtgatctaagataagttgttaccttttcttctcttgaagatactttgttatatctatgtttttggaagtcttatggtaactgcaacgcaaaaaatctatgatagatccactgaaaataaaaaacaatgacttaaaacatactaccagagacaatcaaccacaaggaagacagtaaaaaatgaagaaaggaagaggggagttacaaaacaaccagaaaacaggcaacaaagtggcagtagtaagttcttacttaaaaatattgaacactgaatataaatggactctattctccaattaaaaggcatagagtggctgaatgctgcctatatgctgcctacaagaaaccacttcatgtaaaaagatacaaatagactgaaagtgaagggggtggaaaaagatatttcatgcaagtggaaaccaaaagagagcaggagtagctatactgatatgagataaactacaaatcaaagactataaaaagagacaaagaaagtcactatgtaatgataaagcgctcagttcagcaagaggagatgccaattataaatatctatgcatccaacacttgagctcccaagtctcccaagtatttaaagcaaacaatagtggatctaaaaggagagatagactgaatacaatattaattaggggactttaacaccctgctctcagcaatggccagatctttcagacagaaaatcaacaaggaaacttcaaagttaaactacacactagatcaaataggcctaactggcatttacgggacatttcactaactatctaactgttacagaattcacattattttcatcagcacatagaacattcttcagaacagaccacatcttaagtcccaaaaccagtcagaataaattcaaaaaagtttatatcacatcaagcatttgttctgaccacaatggaataaaactacaataaatgaataactttctggacacatacaacctaccaagatggaagcatgaaaaggcagaaaaacccaacaaaccaacatgaaactgtaacaaaaggaaaacccaggaccgaatgacttcactgctgaattctaccaaacatttaataagaactaaaaccaattctactcaaaatgctttaaaaaattgaagaggatggaacactttcaaactcattctacaaggtcagcattatcctgataccaaaaccagacaaggacaggacaaaaacaaacaaacaaacaaacaaacaaacaaacaaaaaaacactacaggattgcttgaggccaggagtttgagatcagcctgggcaacatagtcagaaccaatctcttaaaaaaaaaaaaaaagaaaaaaattagccaggcatggtggcatgtgcctttagtcctagctactcgggaggctgaggtgagaggaccaattgagcccaggaggttgaggccgcagtgagccatgtttgtgtcactgtactccagcctggggaacagagcaagatgctctctcaaaaacaaaaagcaagctgggtgtggtggctcctgcctgtaatcacagcactttggaaggctgaggtgggagaactgcttaagcccaggagttcaagaccagtctggacaacatagggggactccatctctcaaaaacaaccaaccaaaacaaagccaaaaaagaacataggccaacatcactaacaaacatagatgtaaaagtcctcaataaaatattaacaaaccatgtttagaaacacatcaaaagagatcattcactatgattaagtgagattcatcccagggatgccagtatggctcaacatatgcaaatcaataaatgtgatccatcacattaaagagaaccaagaacaaaaaccatataatcactccagcaagtgcagaaaaggcatttaataaaagaatgggttgagggagtggagcccatagtcagagcagcagtggtctgggattttggaagtagaaagaagggcagcaccactggccaggaccaccagggaacacccccataggccctgggtgttgtgctccagggagggttccctctggagttattaatcttggtgtccactttgcccagctgcccctcacagggtcagggaggatgaagggaaagcttccttctaatgaaagttcagggactcacagttcctagagcctgtagggagaggaagatcttcgaggaagagcacctgggcattggggcgtttgagaggaagatctatgccaggtccaagtggacaacctgtggactctctctccagggacatacgggtatctgggaatctcctgtagcttaaagaggtaaagacctctccctttagcctgaggactggaggatgctggttcaggtgaatgagtcctgcaggggctggtacaggcctggagggtggtggtgtccagggccttgggttcacccttagcatgattcaggccgggcggtgtttcacatgagcaagagggcctgggttcattgcttcaggacaatggtgaaatctcatggtggaagaaatcttgtccttgccagtgcccagctttcatttggtcttggcccagagtgtcctccctagagaagactcttgtcccttcttcacactgcccttcagggatatgccagccttatgggataagatggggtggagactgtagatgtgggtgggaatctctccacagagtgctccttctctcagcggttgcaccttgtctcagggcttcagcttgaaatctgggatctccaagcccttccctccccagtcctggccaggaccacatgggcagatgcattgtgtgaagtgcatttcatttggggtgtcctctctgcatggcaccctcccgttgattctctttgcgcatgtcagagtgcaggcaccatccacacctcctgctggaggagggacggagctgttgactcctgagagctgatcatgtgttcccaccctcacacacaatcatggtccatcctctgagggacatgtgttgccaccactgtggagatggtgcaactgacagtaacaaacagtaaaatctggtactgaatgggaccttaagccaacaatgacaatgtcattccaaggtgtttcatttttattgattcaatgcaagtcacctgatttcattgactattcacaatagctcgataaagtaaatgcatcatcaccaccactttaaagaggaaaaaggtgcttgggcagtttgtgactactgtggtggctgctgcattgctctctggtaaagccaagtaggtggtgggtgcggcctctgggctgggatgatccaccctcctggtggtggcaggggagccaagctggagccatggcctgtgcagtggtagcagctgaactgaccgctgctgcaggatttgcaagctgttacattttgcgaagccatgaagcacataaaacctcaagtagaacaagtgtttcaaagtctaccaaaatctgccttcagagattattactacagaggtggatatgaacccaaaatgacaaaacgggaagcagcattaatactagataatgaatgaacactagtaatagtagggtaagccctactgccaataaagaaaaaaataagagatgctcattaacatgttatgctcttaaatcacgcagacaaaagagggtctccttatatagtagccacaatcaatgaagctaaagatttactgcaagatcaagctaaaaacagtaggtgtataatgaatttttaacttcatattagtttatgtatatgaatatcaagtttttataataaaatgcctccaaacaaagaatatttgatttagggtttaataacttctaagaggggactcagatgtttcctgtttcacagtcagtctgagagggtcatttttcctggagctgacctgggtggaggcctcacactgatactccccagcatcctctctcctgatggggtttatgctgagcatacagtggccctgggacagctccattctctccatgagtcacagacgctggtcatggaagatccactggataaggttccagagtcatctgtggggcaggtcaggatcacaacatccttttcttctgtgactctggtgttgctgactcagatggggtcggagccactgaccctgtggacaatcagtggaggtgctcaactgaaagtgggctgagggcacgtcttctcctccatccctgggtccttaaggtaactgtggaccccagaccaactgacacaggagctagaaagaaattatttaggaagttagtgagggtaagagcgtccttggcaaggtttcccctttaacaaaaagcagcccaagataattccttttctaacaaagagcagcctgaaaaattgagctacagatgtagatgagcaagatggaagcttgcacaggtgaattccagtaggtgtgccaatagaaaagggctgcctggaagccaggtatgttcaacatggagactccatcctcccttttctccattaccacatgtacagtaaaaaaccaggcaacatggcaccggccaggtagacaatccatctgcatgacaaaagatcagagtggggcagccagcaaatggcacagctggtctaaacaatctttcaccccctgtataaatcagacactgcctcctgaagctcatctataaaaccttctgcatttcactatggaagtggcaacccattttccccaggacccctctctctgtgcagagagctcttctctttctttcccctatgaaacttccactcttaacttcactctgggtgcctgcatcctagttttccatggccatgggacaatgaacctcgagtattaccccagatgaatgatgctgtttcacaatcactggttcagctcccttcttcttagggtttcacagctcggtggggagaataccacgcctcagtggtctggggagtgaggaacaaatgaagaattaatcagattttacttagaacgctatcacctgcctcaaccatcagatccatgttgggaatgtccaggcctcctctcttagatctatacccacttcactggacctgaaatcctgtgtttcccgatgtgttggtgtcactcctatgagaggataaaggagagaactttgctttctctccccactcacaccctgcacaagacagggcccaatatgagacacacactcgctcagtagttctctcatgaaggagggagggagtgacctcgagtgattctgccatctgtagtctgtgtaccctggccagtggctgtatcttcatatgcctcagtttcccctcagtaaaataggacacacaatgagaactaaaaataaaattctaattccccagtgaactgaaaggatggcctcttggccaagcggatcccagagttcctgatcatgacaggatgggaggttacacctcattacagcccctccctttggaagtttagaggtgacaactgactagcattaacgctaaaatcgagatcatgagactgacagaacagactctctgtggccataagataccaaattataaactcaacctaaggtcatgcaggcaagggctaagccacactttcctacatttaaagaataagctatgttctaacacagaattttctttctctctagcggctaaagtaacactagccttcgagataagcaatattgaaatgatcgcggctcatccaccaacactggctaactgacccctgttccaacagccacaactacacttcaattggacaggagactgatttcagtaactttctcctaataagagaccactgagcatggcctggttctgctggtatacagacacggtgcactgagtaccataatgcttgtttcatcttttgatgtataagacctaatttaatacatttaaatctgaattctccaccccaaagtgaacatggggtgcatgtagcatgcatgtttgttgatcacgcatgtgcgtgtacttcctttgtgagtatccatagctccacctataacctgttgaatatgtatacctggccaactcattcagcataaatctatcttccacattcccctcccttgaagtgcctgctattggtctctgctggaggctgcatcttctaccctggggaatggccagcctgcaggctgtaaccctgtgtaagaaataacctggttgggtgcagtggctcacacctgtaatcccagtggtttgggaggttgaagtggtagaatagtttgagctcaggagccagagactagcctgggcagcatagcaagatcctgtctcttaaaaaaattttagggaggagagtgaggatcagaaaaaatacctattggctattatgcttagtacttggatcatgaaataatctgtataccaaacccctgattacatatataacaaacctgcatgcgtatctttgaacctaagataaaagtttgttttaaaaactatctgggtgcagtggtgcatgcctatagttccagctactcgagactgaggtgtgaggagtgcttgagctcgggggattgaggctgcagtgaattatggtcccacctgtgagtagccacttcactcaaacctgggagacagagcaagaaccggtctctaaaaaaaaataaaaatagaaaaataaaatgaaaaatatatgaaataaagtctcctttccaaacgtacagatctccgatttttctgccaacaatgataaatggtcagtggcttgccatgttgtctgtgaattacttttaaaatattcacgatcacctgacctaaaggttggtaccaaggaaccgcctgaatacaccgtctctgattatttgcctccaacagagtgttccctgggcctgatctctggtggacaatgagctgctgggaacatcctctcttctctattcctcccctggggatgctgaccttcccttggagtctcctaagttccccagggcagtcggctaatgtcctagggagcttacctgtcttctccataccaagtctcatgtgaaggacgaggctttgcccttgcccagatgaggctctgggggctgagccctggctggctaccagctgcaagagccatggcccttggacagctggtaaatccttgttcccagtcagccctgcccaagatgcctcaacccagccccggcacaggcttcccagggtcacatggagtcaggatcctgggacaggggactggacaggggtttccagggctgagtttctgaacaggggcttcccaggggtcccctcactccaggatctgacatggtcctacaaggaacgtccatggggaggggacccaggagggggaactgacactgacctccccttactgagcctccccccaaccccatcagactgtccttcctctgtagcaagtgcctgcagggtctggatgcaggaaagaaattctgatctgtggaagtttgtctcccctgtgtgtgtcttgcactaaatgtccaaacccccaaatgggatgtaatgtagagggggacacaggcacagcccaggcctgaaaatcctgtgtgtgtgaagcagaactgacccccaacacccagagctcatgagacatcactgtgtacgtgaaactggccagttacttcttcattcacaagatctgtttttatgacttgtagggtgtaggatcctgtgtcattgttggtgacattctgtatcagcagacatgtattggggtatattgtctctcagcctctgtggcaggtcctggggtaattacttgagttcctagtacatatcctgtaattcccctttgtaccagttgtagccaagcctaaggcagattgtgggtgagtggaagaatctccttgccttctgcagcttcaacagtgacttgggcagtggtaggcaagttccagaaagttaaaagtgaggctaggagtggggagagagcatcagttaatactgggccctatgcattgaggtggaaagatggggccctaggtcctggacaggtctcttcatccctcagccttggagtgtgtgtgtgtgtgtgtgtgtgtgtgtgtgtgtgtgtgtgcgcgcgcgcgcgtgcgtgcgtgtcctactgggccaaggtcagcagcatgacctcccttccttcagtgcctctgaccttggcatttccctgtttggagtccttttccccaggggtctgcctggctccctccctactgccttcaggtcctgctcacattagggcatccttgggagaccccttccctgacacctctagagaccctgggtcttccctttctgacctttcgctgctgtgttccctccagggctcttgtcaatacttgacctcacattctagatacccttgcatgtctgtcttcctccctatgagagcatgagctctgtgagaacagggacttgtgtgatcttggttgcaccccagtgcctgggacaggctgcggactcctgtggatgagctcatgagtgttcccagggcccttcacaacgtgggatttattttccaatggctgaggttgttggctaagagctctgttggagttcaatcaggctggtgggaaaaatattagagatagttatagagatagacacaaatcttcttggaagaccaaaaagtttgcataactttggtaatagatctgactgaaggtggtccctttacctttagttaaacaaattaaagtagtaacaaaggaaggcagagtagtttgtctagccagcttgtttactcatgtgatcttaagactaaccattgatgtgccacaggtgcttaattgctttctacttgggaagtccacaatgtcaattaccctctaacggtgttgactcaagcctttgttaattaatcttactgaataaatatgagtctcactagctgatcaaggccatggtcacaactgtttataggactcagcagggagtctgtaagcggccctgacagactcagctggactggcaaagcaaaatatgtgtgtgtcagtgtacactattcacccgtcccccacagctggtgcccctatatgaggagtgctgccacagagctctgtttagtgtcccttgttttttttcttgagtattaccccaacttaaattgtgattattgtcatctgttttcaacattaactgctcagtgatgattcacttggaaaacattaacaatcgagattgtttcttcactaacaacctcagattatttagattttcctgttgtaatcccttcttcctgtttagtgtccaacagaagccctctgtccctctcaggtccccgttctctccaagaaaccccagccagtctctgtgctccctcctcccatccactcccagggagccctcccctcacctgtgagcagaagcgcctgccagggatgtgcactctgtgaggaggggctgagggaggccccatgggctctgctgtctgctttgtcctcctctgtggagaggagcttgggcttcagaaaataaggaggccagaaagtaaggaacaggctgagaaataatggggatgtgtcgaaaggtcacagatgccaacatctttgtcctatgcaatattatccataaaattacaggtttgagatatgcttaaattttcttctaacatgcattaaaataaacatataacttttaatagttatattaaattgtatttaatataaattaaatgctcttgtcagagctactgtgactgtcagctctgctgtccttcctctctctgtgctaagcctcctcccagggcagaagcacttcccagggccaggggtgggggcggggaaaggtaagtggcaatgaggatctgcacaggtagcctttccgcctcctcccctctcagtcctgcctccttgtcttcttttcctctttttctccaatctacatttcagttccttagaccacgctgtgagaagcaaggcttattgggacccccatcccttaacaggatgacctgtgctccccataagtgacctctgctgtgtctagggattggctctgtcagcacctcacagagagtccctggggcccccaaactcagtgttattttctctatgacacagaaacccctctgggtatgcaaggttttcctcatgttttctaatgtctgggaaggttggatttactcccagcagggaggtcacagagatgtccagggagtggggtcctagaaatggacaaatctagagctaaagcccaggtctacgattttcagttgtttttttctgcagtgctatgtgaccctaatttcctaggagtaactaaaatgcaaacctcagacatttgtagacattttatgatttttctctacagcttgtaccactgttattattatttgctttatgctttttcctaaataaatttactttacaaaacatccttgtcctagtagggtgcaggggctcacgtctgtgatctcagctgcttgagaggttgaggtgggtggattgcttgaggacgggaatttgagacaaaacatctttgtcctatgcaatattatccataaaattacaggtttgagatatgcttaaattttcttctaacatgtattaaaataaacatataacttttaatcatcatattaaattgtatttaatataaatttatatacaatacatttttatataataaattatatatataaatgtatatataatagtttttcttttttgagatggagtctggctctgtctcccaggctggagtgcagtggcacgatctcagctcactgcagcctccgccttctgggttcaaacgattctcctacctcagcctcccgagtagctgggattacaggcgcctgccgccacgcccagctaatttttgtacttttttagtagagatggggtttcgccatgttggccaggctggtctcaaacacctgacttcaggtgatatgccgcctcggcctcccaaagtgctgggattacaggcatgagccaccatgcctggcctatatattttatataattatataaagttttctataataaattttatataataatatataaaatggatatttatttaagataaagttattagttttatatatttacatatatttaggaataaatgtgttactgtgggagcccagtgcccaggcaggtagtcagtacatgatggttgtcattagggttaatactttggaattctggattttttcccaagagagtgtctacgctggaatattgggcttgtggctttctgctgatgtgcatgtgtgaagaagctacttccacttattaggacttgtgtatctgtctcgcagtttcactacctattttctcgtgatgttggtcaagtcgcctaacttttctgtgcctcatttacctaatttgtagaatatgggtaacagtacacaagtgtgagtgtgtatttcccaggactgaccactagagggcgtgaaggcaccggcacttactattacagcaatgggtgtagtagtgctcatggtcgtaaacatcattctcccatgaaaggaaccagggcttcctgggagaaataactgattccagggctggggccggaaagcacaagcggagcctggagcatctcgtgaggccagaaagtaaggagccggctgaaaaataatggagatctgtcgaaaggtcacagatgccaaccagaaggagctttgaatgaccaattttgagacaaaatgagcactataagaaataatgatagtaataaattccaacccataaatacccatgagttcctactaatataaataaataattgaatacataaatatataaggatgaagaaacagctttttcttacagcagaattccaattaatgaatgtagaaggaatgatcaaatagaaaatcactatttggctaacagcacagtcaattgtttgtaggcaagaattatcaatggactttaaatatgaatgggtaaaagtatgatgatgctacaactagtgagtaccaagggggaaaaaaaagtacgttgagaagaaacaggctacttccatattcccaaagtatcacttcaggagctacttattgattataatgggacaaatagtaacttacagtagagaaacctggcaacagagtctctccgaggtacaaaggctctcttcaggaaggaggtaaggggaaggaagaagaaaacactgtcctgcctcaattatttgctttccccattctcaagtgtacttcatagacattcaaagatatgtgttgatagtgtccacgatccacatggctctattatagtcatttattcacacatacattcagtgaggctttgagtgcctaatgtgtgcctgatatttgctagatggtggatgctgagaagatcaggtgtgctgctgtctctagggtgactgaatccacctgccccactttacagatgtggaaattaaagtgaaaaggatttataggattagttcactgtcacaaggtcactagccttaaagttacaggagtaaagcaagtttcctgacttgctagattttctgctgcaggtgctgacaatggtgagctccaataggagagaggacactcagagtgaagtgggagccctgaacaccctggattagccaagaggacatgccgggtccagctgtgaccgcacaaaggaccattggggatatttgtattctctttttcacttagagcttgaaatgaggaaaactaagtgcagaaaaccaagagtggaagatttttcacaaagcactggtaacatgcatcagaaaaccctgtgctgatgtctgtcacggtgtttctcactgaacggtaatagtctggctttgagtgtgttccctctacagcctggagttctgcgaggcagggaccaggtgtgattcatctttgtctctccagtgacagtacacagcaggctctgataaatatttcttacaaaataaaatggaataaaaagtagacatctgcacaggtgtgggatgactgagcagcagcagaagcaggaaaagtcagcgtccccagatcagctgatgtggtgttcggattctagataggggtgaggtgccaggatggggatgggggtcctgtggctctgctgccctgggggacacccctaggtttcacagtgcctgctgtggttgctgcactttgcttccccatgggaaagtgatcagagggtgtggggcttcaggtgaccccatgtgggaaatggccaagggaaggtggggtgggcggcacatggttttttttaaccaatatttgaaggtaggttgtatgaaaaggtgttaggcttatttcagcttatggggagtaggacagggattggtgagtgtgtatcaggtatattttggctcaggatggaaaagaactgtcacagtaacataaggtcttttgggaaattacatgtttactggcagagttcaggccagggctgggtgtctgaaaatacctgtcagggtcacttttatggttacaagggcagagcttggcttggaaccaggtttcttactaataccacatattaagtattataaaaactgtcctttgcaataggacattgctctatgatgcaggttgaggtccctctgtttaagtaattgtgggtggctgtgattctctcatctagtctgcgacttggacttcacctccatctgcagtccctctcctttgctgttgacactggtcagagttaagcgcatttactgacgatggtcacagggtggcagcactgcctctctggtattttctaaaacctcttcctggaactgagccagtctaagaggatgtcatgactaagaaaagggcactaatgaggtgaacagataattttttttttcttgtttctcctgtgaagtaacagagtggaggtgagcatggaataattgccttttagaaatggaagacaatggagagaagtgtttcgcaaaccttaatgtgttcacagatcccacacagatctttttattcaatacagattctgatttttctggtgaggcctgagattgtgcatgtctaaggagcttttggatgatgccattgctgctggttggcggaccacactttgagtagcaaggctcgaagatcatttagaggttaattctcactgcatctaatttatggatgaaaacaaaccaaggtccagagagagcatatacagcttgcctaacaaagccattccctaagtgcctgacttcttgcatttaaacccagggcttcagcctttgtccagttctcactccacacatcacacggtttgttcactgttgtgaacgacagttgtggcagcatctctttagtttaggaatccagagccccaatttcactaccctctttggtcttggctcatgctgtgacttcgaatagttttgcccttacttaaaatcttcagtggctcttttgtaatcacaagatcaagttcgaatatctctgtctagtgttcatggctttataacatatggtatctctttagtaaccttacctaacttccctgttttaaaattgtctcttgctgccatagccctccttgctccttcctgctccctaacaaactgtgttcacttctctctcagtggtagtgatgatggcatggcctctgatgttagactcatgtaacttctaatcccagatccaccaccaacattggcaagttgattcatctttctgaggataagcatcctcctctgaaataaacttagatggcggttgagaggggtaaataaaataacacacaaacccactctcatccctgagaccctcttcaaaactagcatataaaaatagctatttgaagaggttcagtgaaattcaaggtaacacagagaaggaattcagaatcctatcagataaatttaatagactgaaataatttttaaaaatcaggcagaaattctgtagctgaaaaattcaattgacaaaccgaagaatgcactaaatctttcaacagcagaattgatcaagcagaagaaagaatttgtgagcttgaagagataatatatgaaaactcagagtcagagagacaaaagaaaaaagaattaaaagaataatgcatgcctacaaggtttgattattaagctactcaaagagatacaagagaagggtgaaaaccaacataaagaaatgtaaaaaacaatcagaatataaatgaaaaattttctaaaatgctagctagtttttttttgagacaggctcttactctcatcacccatgctggagtgaagtggcacagtcatggctcactgcaggctcaacttcctgggctcagatgattctcccacattagccttccaagtagctaggactaaaggcgtgtgccaccaggccaggctaattttttgtatttttagtagagatggggttttgccatcttacccagggctggtcttgaactcctgggctcaagtgatccaggagattcactgccaaaaaggatataaccaagtcatatagtcataggttatctaaagtcaatgtgaaggcaagaattctaagagcagtgagacaaaagcatcaattaacttataaaggaaaacctatcagtctaacaccagatttctcatcagaaaccttacaaaccagaaggtattggggtcctaatcttttggcttcttaaacagaatagctctcagccaagaatcttgtgtagagtgaaattatatttcaaaatgaaagagagaaatacagtctttttcaggcaagcaaatgcttcaggatttgtcacggctagaccatcctacatggaatgttaaagggacttctaaatcacaaaacaaaagatttaaatagaacagaatagaacctcttgaaaccaaaaaattcaaatggcctataaaacaataacacaataagaaaacaaagtagataacgatcaacatgatgactggaacaaatattaacattgaatgtaaatgacctaacactccacttaaaagacacagattggcaagataaataaaaaatcacaaaccaaatatcagctgtcttcaagagactcacttaacatgtaaggattcttatagactcaaggtaaagagatgataaaagatattccatgcaaatggaaaccataagtgagaaggaatagctatccttatatcatataaaacagactttaagcaacaacagtaagaaaaagacaaataaggcaactatataatgataaaaggatcaatcaaacaagaagatattacaatcctaaatatatatgcacctaactttggagctcccacattcataaaacggttatgatgagacctaagaaaaaagatcaacacaaaacagtgagggtgtcctgggttttctttttattggacagcagtgtactagcctatcactttcccagtcaggggatttttggtctccccattcccctaccatgggttcatgccaaagtccatattttttattagtgtttggaattggattttttttttttgaggtggagtctcgctctgttgcctaggctggagtgtagtggcacgatctcggctcactaacctctgcctcctgggttcaagcaattcttctgcctcagcctcctgagtacctgggactacaggtgcatgccaccacacccagctaatttttgtatttttagtagaaacgagatttcaccatattgtccaggcttgtatagaactcctgacctcatgtgacagggaaacaggcactcagtgaacttcatgcgattgaggagttaatgataatgagagaagggctgtgaggggacagcactggggacaccagagcctgtgacgggctgagttgctgtgccttgggagatgcccttttgactgagccctgggaaggagggggtgtgggggcaggagctgcctgcagagggagtggcctcaggtgggcggccacctggctgcagggaagaggtgacagagttcgtgtgcagagcttggagggtgaggaggaggtgggttgaggtgaccttggtgagggtgaaccatggggggctgtgggccctgctgagggaggccagccagccctggacctacagggtggtttggtcttttttgtcccattcccagcatccactgagtggtgaaactctgcaggccagggaccatcccactggccagaaggagcgcacagtaggtgcccactcagtgcatgttgggctggacagaacctcactctgccccctgcccccagctttgggagctgcagcaaggtccctccccctagggatctccatgcctctgtctctgaggggtgagatggggagacttcaaagggccatctcagagtgtgggggatagagacgcagaagtgtgggggatagagggaggcctgggctctagacccaaaggaccttacacacctcctgagtcttttcaaatggtttcttctgttactttaaaaatgatgtaagtcatcatatttattgtaaatcccaggaatctaatcatgcgtaaaataaggtgtcttatccttgaccccaccccttccccaattaaatttccaggatgttaccactgtttgcagttggtgtgaatctctctttaataatactctgtttatctcacttgtcgttttacgccaaaatacccattgaattatattattgctgaagaccattcttttttttttttttttttttgagatggattcttgctctgttgcccaggctggagtgcaatggtgtgatctcggctcactgcaacctctgcctcctgggttcaagtgattctcctgcctcagcctcctgagtttctgggattacaggtgcacaccaccacacctggctaatttttgtatttttagtaaagacagggtttcaccatgttggtcaggctggtctcgaactcctgacctcatgatccaccctccttggcctcccaaaatgctgggattacaggcatgagccaccacacctgcccagaccattctgttctactgaatcatgtgtggtgggcacctcttatatcaatacatatggattttatcttgtgtttgttattggctcccctttttctcattgcatggctacactcaatgctttgtccacacccctgttcctgggttggaatcttgtgacagaaaatgaagtaacaaaggctaaagctttctaaagtggagtcaggagattgcaagacaattgcactttcaccagcaagagctcaaaccacagaatgttccaatagatttggataaacagctgaagtcagtattcaccagccttcaacatctcaactaggagaaccctaaaattaactaagcacatagaatggaatggacttgtgatttaggattccttctcagccaatgagctgcttctgaaaacaactttttgtggaaattacctgtaaagaaaaccctctcctgtgcttgtcttacagaacactagtcagggctgccctgattcagtggacccgaattgctattatttgtttcctaaacatatggtattttctgtgaccttcatctcaatcttttttttaagttactgggctgtttcccagttttcataatgacgagacattctgcagtgtttcatacacatgtcttttccccatgtggagtattgatccaggagctcattcagtcaacgcatgtttatgaagcatcctgtgccaggctgtgggctggtcactgtcttcagcagagagaggacaggcacagtcttgccttcacagagctcacagctcagggaggctcttagaagtgggatactggtcggagcatgtgcacattaaacatgatgaggtcaaggttgctatagggactaaaccacagtcccaccaagatcgcattgagttcctgtggtagaccagaggtcagggcccctaagatgtcctgagcagctccctctgctcagaagttttggttccacaggtgacacacctgagcacaggtgacccctgcagaacctgtgattaccacccaaagccaagagtgagtggtgggtgttctaggaggaaccgtcacctccatgggcagggttggggaagactgaggggagcaggtggctgatgactttggccagaaggtagggggatgggcaggtgtgcgctcatagggaagggaagagaagggagggcattgcaggcaacaacacaaaggttggaacctgccttcatggactgagaaaagcagggagtccacccaggctgcagctggggagggaagacatggggagcagtgggtctaggggagaagcagactgcgattgaccttggggactgggcagtgagcagaggtgtgttatgtgtgtctgtccccatcatagatatgaggaggggtgaggccgcgggtggcacctgggtcggtgggatttcatagtgcctgctgttccctagagcctctctgtatagagggtcagaatagatctgaggctgtggtctgggggaaggggctggtggtgcttaccatctctaggggtgggaggagagggatgaggatgcccctgagcagtgaagcctcaaggtgtgtggagccacagttgtctctcattagacatgtgttttgcgtgaggatgccagggcctggtggttattactgttgtcaagtttgcatgacaaggacccaggtatccagggatccagagcacagggcccctggtgaggggatgaggctcagatggggctgaccaggttcatgtggtcagagtgggagggactgatggagagacagagcctcaacccctcctgtcaggagctgtggctatgtccaggagagatgacaaggatgacccaggacattgagtgagtcattgagacattgaaggtgaggacagggcagagaggaccctggtgactgctgaaatgtaggatgtgaggagggctctgacccatgcaagttacaggacctccccacccccgagcccacagatgacccttaaattgggcatcctgagtgctgtgtgtgcccagcagggacactggataggctggacctgagtctctgtaagggcagcgctggtctgtaggaccagagtcttctctgtgggtgtgacgtgggcaggaattagcaagatgggggtgacaaggcttggcttggaggatctggtacagaagcccatgggcttggtcagctcagcttctcaggggctcagctggggctggaggagcaggatgctgtgctcagggcatgctccaggcagcgtgatgtgtgtggttccagggtcaggcacgggggtcaaaaattaaccatgaaaagttcccaccttctgtaggcagagaaaatggcctgattgtcagggtcagggagacttaccatgtggccaaagcaggctctcagcctcccagagaccacaccctgggtgcagcactcagctctgcagggtatggcaatagatgtgccaagaaccccaacatccagatgcatgcaaaaattttgcgatatataaaatagagcagatcaagtttccctgcaataacgttgttcctggttgtgtctttttcttgtaaactagacatggacatctttccagcagtctgttctcatctgccaccttcctgctgcagcacctcagaatgaacattcctgagacactgtccgtggtgctgacgaccaagagctatggaacagagtgtgatgtagaatcttctagttacctctgctctcctttcacttttaacaacagagcatcattaacaatgagaaggtggagaggtgttcaggatcttgaagtgacttctgtcttgctctcccataaccctgaagctgctgtagacattattgcagaaactgacaccacagtcaggatggccttgtccaggagcccatgtgcagtttgtagtgagcaaggatgagaaaatggtcttgaaaggggtgatggacagaacaggggcttttcaaaaatgtcacatcatcacccccagcatccgtgaatctgtcacatggtaagagaccttacagattaaatgaaggattatgagtttggaagattattgtagtttatccagatgggtccaacataatcacagaatcccttccttacaaatgagagagggaggtgggagagtcagagaaggaggaggagatgtggggatagatgcagaagacagagcggtgtcaagatgctgcactgctggctttgaagatggagaaagaggacacagccaaggatgcaggaggcctctaggaggtggaaaaggagaggaaacgcactctgccctggagcctccagaaagaacgcagccatgtgggcaccttggttcaagtttctgtgtcacttagcttgtgggaatttgtcacagcctcaacaggaacctacagaggagtcaccttgtgtgcaggtgggatccagggtcatttacagctaaatcctgatgtaaatattgcaggttgcttttcctacttcctatctcatggccaacaaccctggacaatggcagaacacccttggaaaccacggctctgtgctttagtggagggaccagcttgtttgtgggaaggtagcacctggtccaagtgaacctacatgagatcgttactctccccagggccctcagggaagggctgagaacagctggcccaggtgtgtggaggagctgcaggtgaggcagggctggaggggcctgtgggtccaggtagaggggcagacaggttgtcccatcgccatgggagcctgcacgagctttaggttggggaaccctgctcctctgacctggacgctcctgtgtggagaggaggcttgctcagtgagatccacgccagggggtaaattgggaactgatgggaaatgaggggctagagtcctgggtagtgcctgggaggaccttgctcaaggactgaattcttggtctgttcccaccttggttactctgacaacccctctctgtgtcccacggggataaagatctcctgagcagtggccattgggacagaggagaacctggtggccagagctaagcatccaggatcctggatttggggacaggcaagctcattgctgggggacagtgatagatacggcctccagggcctgggtgaagagagcaggagggctcaggacactggaggctgtgtggaggtcacacccacgatctgtaccacccatggatgctcctgcattgctcacctttgtgtggacatcagatggccccaacttttgcactcctgagacatctcatgcattcacagagggacccaggctggggctgtgcatggccttggtctctagggtagtgtgaggacagctgagcactcagctggctgggcaggactcctgcgaatcctgccctttcctgtgtagggtccaccccagcctgactcctaaccccctactcctgtctttccagggaagagagactggggttgagataaggtggagatatttttcctgtgtgacccaggagagaatggacatggagtttcaggtgagtttctgctaagttcccatgagcagaaaaagagccaatgagaggaagtttcccctttattcagatcctttccaggtgaccccgggtgggccataggcccattcactttccctgcaagcccccgcttcctgtggtgatgggaagccttcgccttggcccacccagagcccggggcagtctgttgaggtctctatatattcagcagggacccccatcccttcctgtccccaggcctgtgtctcctcaggactcagagctggttctctggctcaggctccatgtccttccccatccccagggctgggggcttcagggacgctccatcaacccacaggagcagctcccagaggaacctaagaagccacatctgctttgtggtcgatccagcagtaaatgtttgtgtcagagtgtagcaattccagtaaaaacagagaagaggtcttgacccctgaggccttctcagaacagggtctggcatctctctctgggcccacccagggctactctgggactgaacctggctgtgctcagggggttcctgctcccaggcccctccctcctctgctcaccacctcctgttattttcactgcagtttcctgaacttcagctcagccagatgccagtggggacagatcctgggtctccctggggcccaagggaccagaatatctgtggcccccactcacctcatagatgagagcagctgccctggtgctgggtaggggaatctgggcaggggagagaggggtgtcaggggacagggaaggattcctgctgtgtaggaattccagggctctcctcaggtgatggagggtcccagggtggggttagcacagggagtggatgatcctggccctgaacagaggcccagctcatggccagggcaggtctaaccttatccaagtcattctgggtagggtgggtttgtgctggggattgacagtccccctgccctgagcctgcacagctggggccccagtggaaatgggattgggaacggacagtcttacctaggagatggagctgtcagagggtccatggcctggggacagagacaaaagtgagcacgagagtgttaggatagctgggcccctcctgcaagagtgtgtgggggtcctcagttcttagagaattggggagagggagcctttctcaggttattttaggggtcaagtaagcaagtgaggttgaggaagtgacccatgacccagagcccggaggttagggctgacccggccagttggggtttcctgtgtgatgttttatgggatcctctttgcagccccagggatagggtcagaggcccctgggtgtaactggcaggagtggacaacttggggctggcttagtagttcccagccacacccagactgaagggacactcaccgggggtggaggctgggggctgctgctccctgaagtcactctgatcgctggccctaggaaaggtcagggttatttgtgaaggtgcaaggttaaaagtcacaaattggagttaaaataggggaccaggaaaggagcctatttccaagaggggtatggagacctcctttctttatggagttctgtggtaggaggggcccaggtgaggggagttgaggaaaggccttacaaagccacatctgtcctggccagaggggaaggactctcaggcagatgctgggccaggagaacattgatccagtgacacaggaaagggactgaggacccagggaaggaatcagaccaccaggggttgcctgagaggaagggtcaaggcaccagggggaaagcagggccaggcacatgtgcaggacactgaggggactgcatgcatcttggattctcctggaactcagtgtccctgctgtgaccagacactccactcagggctggagatgctgaaatgggacaatgatcttgtcttctgtctctgccctttggcaagagacataaacgacattccaggatatgccatattggggccccggttctcccttctcacagctcagtgtctgcagttaccatgtcagtcaaaggggtgctgaccccacccagcccgtccaggctgttccagtctccactatgtgataatgcccaggatcccccctcagatgccctctcactgggtggatggattcagtgaacagggggaggtaccaggtattgagcaccgctcccccctgctccaggcagctgtggctttgctgtgctaggaaactaggaccatgctcaggggcatggccttaattggactgaattcactgaggacaaagctgttgaggaagcagcccagggtcagcagctggtgaggaaggtgccatggaatgagagggaaggatccctggggagtcgggaggctggggagagcctggcactgaatacaagacagggtctccttccttctcgcctggggtcagcgtgaaggatgggagcagaatggggaaaagctgtggtacctgccagtttttcggaggagcaggaaacacacaagtgcagccaccagaagactcccaaccaggaccccgatcaggatgcctagagtgttgtcatctgctgaaagaagaaggcaaaggggatgaggtccaaatctgttccagggggaaccatgaggggccttgcagggcaggggcatggtcagggaggaaggaaatgccatggagcctgagtgtggtctgttgtgctgtcctcatagctggctcccttgctctccgtggttgcaccattttctgtgtcttaggcttgaattactgggatgcatcaactcctacattctcccacaggaagcctgcacctcatcctgctcctgtgttttttagtccctccttcctctcacatcactcctcttccccctgtttctttttttccatcccatggcagtcgtaaagggcaggcccttgctgccaactcaatgctgatgagcagggatgatgttcattgactgttttcaggggccttccacatggaaggcacagtgggaatcaatctacctgcagcttttctcaccctcccattgccttgagggagaagggtatgtgatattgtgaaatacgtatttggtgttcatcaccattgatatggttaggctctgtatccccacccaaatctcaccttgaattgtaataatccccatgtgttatgggagggaccttgtgggaggtaattgaatcatgagggtgggttttttccatcctgttcttgtgatagtgaataagtctcaggagatcagatggtttcataaagggaagcttccctacacatgtcctcttgcctgctgccatgtaagacatgcctttcaccttccatcatgattgtgagacctctccagccatgtggaattgtgaatcaattaaacctctttcttcatacattaccaagtctcaggtatgtcttcattagcagtgtgagaatggactaatacagtaaattggtaccagctagtggagtgctgctataaagatacctgaaaatgtggaagtgactttggaactgggtaacaggcagaggttggaacagtttggagggctcagaagaagacacaggaaaaaagtttgaaacttcctagagacttgttgaatggttttgattaaaacgctgatagtgatatggacaataaagtccaagctgaggtggtctcagacagagatgaggaacttcttgggaactggaacaaaggtgactcttgttatactctagaaaagagattggtggtattttgcccctgccctagagatctgcagaactttgaacttgagggaaatgatttagggcaactggtggaaaaaaaattctaagcagcaaagtgttcaagatgtgacttgggtactgttaaaaacactcagttttatgtatttacaaaggtatggtttggaattggaacttatgtttaaaagggaagcagagcataaaagtttggaaaatttgcagcctgatgatgcaatagaaaagaaaaatccattttctgaggagaaattcaagccagctgcagaaatgtgcataaacaatgaagagcaaaatgttaatccccaagacaatggcaaaaatgtctccagggcatgtcagagaccttcctggaagccccttccatcacaggactggaggcctaggaggaaaaaatgtttcctgggccaggcccagggctcccctgctgtgtgcggcctagagacttggtgccctgcatcccagccactccagccatggctaaagagggccaaggtacagctggggccatggcttcagagggtgcaagccccaaaccttggcagcttccatgtggtgttgagcctgcaggtgcacagaagtcaaggattgaggtttgggaaccttcgcctagatttcagaggatgtatgaaaatgcttggatgtccaggtgaaagtttgctgcagaagcagagccctcatggagaacctctgctagggaagtgttgaagggaaatgtggggttggaaccccgacacagagtccctactggggcactgcctaatggagctgtgagaagaagaccacaatcctccagaccccagaatggtagatccactaacagcttgcaccatgcacctagaaaagctgcagacactcaacgccagcctatgaaagcagccaggagtggggctgtaccctgcaaagccacaggggtggagcccaaggctatgggagttcagctcttgcatcagtgtgacctggatgtgagacatggatacaaaggagatcatttcagagcattaagatttggctgccctgctggattttgggcttgcatggggcctgtagcccctttgttttggccagtttctcccatttggaatgggtgtatttacccagtgcctgtacacccattatatctaggaagtaactaagcttgcttttgattttacaggcttataggtggaagggacttgccttgtctcagatgaaactttggacttggacttttgggttaatgctggaatgagttaagactttggggaactgttggaaggcatgattagttttgaaatgtgaggacatgagatttgggaggggtcgggtggaatgacatggtttggctcttcttcacccaaatatcaccttgaattttaataatccccacgtgttgggggaaggacccagtgggaggtaactgaatcatgggggtggattcttcccatgctgttctcatgatagtgaataagtctcacaagatctgatggttttagaaaggggagttcctctacacatgccctcttgcctgccgccatgtaagacatgccttttgccttctgccatgatttcaaggcctccccagctatgtggaactgtaagtcaattaaacctcatttttaaaaaaattacccagtctcaggtatgtctttatcagcagccaagaccagctcggtcgcggagatcctaacccagcagtgctagaggaattaaagacacacatagaaatatagaggtgtgaagtgggaaatcagggttctcacaggcttcagagctgagagccccaaacagagatttacccacatatttaataacagcaaaccagtcattagcattgtttctatagatattaaattaactaaaagtatcccttatgggaaaccaagggatgggccgaattaaaggaataggttgggctagttaactgcaacaggaacacgcccttaagatgcagattgctcatgctattgtttgtggcttaagaacgcctttaagcggttttccaccctgggtgggacaggtattccttgccctcattcctgtaaacccataaccttccagcttgggcattagggccattatgaacatgttacagtgctgcagagattttgtttatgaccagttttggggccagtttatggccagattttggggggcttgctcccaacagactaatacacccattttctggtatgtgactctaaagtccttagaatcttcaaagtgatgtctttttcaagctaataattgactgatgactggcagcccctaggcaacttcagaatgaggctggtcactgacccaggtaggattagagggttgggactttcagcctcacccctaatccctggggagggacctggagtttgaattaatcaccaatgaccaatgaatcaattaatggccaatgattgaatcaattaatggccaatgattaaatcaatcatatctatgtcatgaaccccaaaaggactgggtttgaagagctgaacccatggaagtttctggagtgtggtgcatctggggagggcatggaagctccacaccccttcccacatgccatgctctgtgcatctcttcatctgcatcctttgtaaagtcctttattacaaaccggtaagcctaagtatgtgtttccctgagtcctgagagctgtttgagcaaactaatccaacccaaacagggagtcatggaaacctcaatgtgaagccagtcataagaagctctggaggcccagacttgtgactggtgggaaggtggtggcaattttgtgggactgagccctctgctgatatgtccaggtagatagtgtcaggatggaattggaggacacctagctgatgtacggtgcagaactgattggctgctgggtgtgtgggagaaacccccccgcatcacatttggtcacagaagtgtgtctgtgttgatgattgttattgtggagtgagagcagaggaaaaacacagtttgagtttttccaaacagggtggaatcccatctgccaatttagaatctgaaacttatagtttcagtacttcaattaagattgaagtacttcaattcagtacttcaattaagattcagtacttcaattaagattcagtacttcaattaagattacagaactggtaagtgaaagtgatacaacaaaaatgtaaccaaagtctgctcaacttaacagctaataacaacaaagttcataaaaataataccagtcgatattgatagcactgattgagccctggctctgtgcatgaccttgttaagggctttaatcgcattaatctctgaataaatatcctcacaaccaccctgagatccaggtgtttgtaacaattctacagatgaggaaactgaggcccaggaggttgagtgtcttgcccaaggtcaaatacctggtacctattgtaaccaggatgataactggatgagtctaatccctgagttcttacccacattgctccccaggctctgaaggaatctcatccttctcattccgtgtatcattttacaccccccctccctcctaggaaaatatacaaggaaaggagtgagaggggccgagggtcactcacattttacagtcagcttgagggggtcgctcctgttggagctgactgggttggagacctcacactgatactccccagcgtcctcctgcctgatggggtctatggtgagcatatggttaaaccaggacagcttcatcctcttcgtgacctgcagacgctggttgttgaaaatccactggaaagaggttccagtgttatttgtgtggcaggtcaggaccacggagcccttctctgtgactgtggtgctgctggcttggatggagggctgagccactgactctgtggatagagtgaccaacagaaagtgtcttggggccatgctgcatcctcagagatctcagagtcaaatttagaacattctcctgtgaataaaggagaaagatgaaggacagggaggagcagagagaaccagagacacccatagcagcgagcagtagggactacagtgacctcagagaccccagggaccaggaggacccagctgcctcagaccaggaccagggagccctgaaaaccctcccacagatgagcggccccagagtcacatgagatgcaatacctggggtggctttaggagcaggcagtcagagaaatggaacatgggtctcagcccctaagggacaaggaagaggtgtggccagctcctcctaggatcctacatccaggacccagtctgtaaagaggttatgattattcctttcttttttcattaattccctccctccttcatcagagaactactgagtgtgtgtctcagttgggccttgtgcaggtacagggtgtagtgggaagagaaagctgagtcctttccttcatcctcccatgggagtgacatcaacaaatcaagaaattcatgatttcacgtccagtgagggaagaaatgtggatctgatgggagaggcttggacaatcctggcattgagtctgatagttgagacaggtgatttcgttctaagtaaaaactgactaattctccatttgcccgtcattcctcagaccagaatctccctctctgagctgaggatgcccaagaagaaaggagctgaaccaacatctggtcctggggtccacagatgccccacggtggtggccacgaccagattctgggctgcagacacacggtggtgtgacgttgagcactgacagcctgtgtgatgctgatgcaatttctctttaataaaatggggtaaatgtcaatggtccctggcttgccatcctctctgtaaattaacattaaaatatttacaattacctgacctaaagcttggcacagaatagctccaaataaacatcatctattattattttactccaaaaaaaaaaaaaaaagagttctctgggcctgattcctggtggagaaggagcggtccagagtgtcttttctctgctttccctcctcctgaggacagtgcacttcccgggacatcttttaagtttcccatccagtttaatggcctgggaagtttgtttgtctgtcctctccactctgactctcaggtgaaagatgaggctctgcccttgcccagatggggctctgggggctgagccctgcctggtgaccagctctaggaaccacggccctgggacagctggtaaatcgttgctcacaatcagccctgcccaggaagccacaacccagccctggcacaggctccccagggtcatctggagtcaggatcttgggacaggggcctggggcaggggcttgaagggctgagcttctctcagaggatcctcaggccaggccctgactgagtcctataagatctttctcaggtcatgtctatgaggaggaggccaagcggggttggactgagactgattttcccccgctgcatctcccgcatcagactatccttcttgctgtagggaatttccacggagtccggataagggaaaggaattctgatctgttatagtttgtctcccctgggtgtgtcctgcactaaatgcccaaaccccaacatgggacgtaatgcagagggggatgcaggcacagcccaggcctgacaatcctgcgtatgtgaagcagaactgacccccaacacccagaggcacggaggaatcactcaccgtatacacggagatggtgagatgcctgttcaatctgagaatttctgtatgtgacttgtagggtgtagtatcccgtgtcctctagggtgacgttctggaaatgcagatctccactgggtgatattgtctctcgaccgctgtatgcaggccctggagtcctaacgtgagtgtctattacatatgctgcgattagctggttgggctccaccgttttccctttgtaccagccatagctgtaaagattctcgggcagataaaccacagagagatgaacattctccccttcagcaacttcaaagggcgctgatgcaataaagagccaggcagtggtgggtgcgttccagaaagttaaaagtgaggctaggaaagggagagaatatcagtcaatatttgacctatgcattggcatggaaagacggggtcctgggtgcaggtctcttcacccctcagccttagagggtgtgtgtgtgtgtgtgtgtcctactgggtcaaagtcagcagcatgaccctcattccttcagtacctctgaccttggcatttccttgtgtgaaccctctttcccaggggtctgcatggttccctccccactgccttcagttcctactcacacaagggaatccctgggagacttctttcgtgaagcctcctctagagaccctgggtcttccctttctgacctttcccagctctgttccctccagggctcttgtcagcacctgacctcacattctagatctctttgggtgtctgtcttcccccccatgagattgtgagctctgtgagggcatggacttgagtgatgttagttgcaccccagtgcctgggacaggctgcagactcctgtggatgagttcatgagcgttcccagggccttccatatcctggggtttatttgctaatgtctgaggttggcagatgaagacagagtttcatgccctggtggtgtttttatttaaattgtcactgtgatatagttttactatcattttcaaaatgtagtggccactgacaatgaacttgaaaacatggaccaactgagattgttttgccccttggcaattccagttcacttagattttttggttctccttagacgctctctcccctgagtctctaacaaaagccctctgtctcctctcagagccccatcctccccaggagaccccagccagtctctgtgctccctcctcccacccactcccagggagtcctcccctcacctgtgagcaagagcccctgccaggggatgcattctctgtggggacaagctgaggggggccccatggtctctgctgcctgctctgtcctcctctgtggagaggagcttgggctccaggaacgctctagacagggttactgtgactgttgtctctgctgtccttccttcctctatgctgagcttcctctcaggcaggagcacttcccgtttatgggcaagggcggggctctgcctacaatgtctctctgtcccctcccctctcagtcctgcctcccttgtccctcctttctccttcctttttgcctatatttggttccctaggcaaaactttgagaagcaacgctgatggggtcctcataacaggacgacccactctccccagtactgacctctgctgtgttctggccttggttctgtcacagccggtagattatttccctttgtgacacacaaaaccagctgggccctgggtctcctcatgctctccagtgctccaggaaggcagaatgatgcccagcaggaaagtgacagaggtggctctgggggctagaaaggggctcactgggtgatggctgggaaggacccacccgctatcttcagtgtcaccagcctggcctctgacccagggacagagacccaggcctggaggtctcgggaggatccccagctcctaggtgtggagggaggtgtcctgtgtgtcctgggaagagaggactttgatggaaggaggtgggaggctctgggttctgctgtccttggtgaaggtttcagggggaccctctccatgtctggggtctgtgcccccagcttaactctcattctctttgcaaatacatatattttgtggatctgcagttgcctgaactgtctcatgtccctaaatctttgtatccctttttacagaaggtcaggaagggtgtgtacatgagtatgaggactatctgatcagggcgagtgtttgtttcccaaagatctctttagatatggtataatacataagataaatgtactgaattagcaattttaagtgtagaattaaatgatactaattctattcacaatgttgtacaaccatcaccataattttttaccagaaaatcttcattataccaaatggaaacttcatacttttaatcaataactccccacttccccctgccccacccactggtagcctctgatactatcaatctctgtgaatttgcctagtttacatgtctcatataataaggaattatatacgtgtattatttttttctggattatttctcttagggtaacacttttaagattcatccacgtcgtagcatatattacagcttctttcctatttatggctgagtaatatcccaatatatgtttatacctcaattttaattcattcatctcttaatggacatgtgggtggtttccacatttttgctattgtgaaaaccgctgcaatgaacttacacttggaagtatctgtttgggtttctgtgttcatttctttgggggtacatataggagtataaatatggggtcatgtggtagttctatgtttaagtttttgagaaacagccaaactgttttccagtttgctgtgctattttatattcccatcagcaatatacgagggttccattttctctacattcttgtaaacacttactatttaatattttttaaaacttatagccattctagtaggtgtgaagtgatagctcattgcagttttgattttcatttccctggtggctgatgaagttgagcattttttcatgtatttactgacaattttaatattttttagagaactatttattcaaatcatttgctgtttaaaaaaaatgggttatctttttattattcagttgtaatagttctttatatattttagatacaagtcccttatggggtacatgatttgcaaaatttttctcatattctgtgtcttctcactttcttcatggtgttctttgaagcacaaacatttttaactttgatgaagttcacttatctatttttaattttgttacttatgctcttgatgtcatattgaagaaaccattgcccaatccaagatcattaagttttactcctatatgttcttctaatggtttgataagttttgctattccatttaggtttttgaaacattttgagttaacttttgtatgggctgtgaggtaggggtctaactacactatctcgcatgtggttatccagttgttccagcacaatatgaagaggctaccattctttccccattgaggaatcttggcacccatgtcaaaaaccaatgggctgtaatggtgagggtttatttctggactcttgattctattccattgatctctatgtgcattcttgtgccagaagcacactgttttaatgattgtagtgttttagtaagttttcaaattaggaagtgagtcctccaatttttttttccagattgttttggccattctggggtgacttttaaaaaagatgtagttcaatggttctcaaagcaggagtggttcagctctccttttttggcagtctggagacctttttaggaccttaatctaagtagataaattattcccactttcttttctgagttgctatgttacagtgtatattgacacccatgaaataattgagagaccctggaagtgcttgcctacatagtgagggacaattagttccatgatcatgggcacagaagattttgttttgggaaacaattttgttggtggagttatattcatgcttactcttttatttgtcttcatagcctgcatctccttcagacttcatatctgtttattttcttgtttgtcctctggggtttgggtgttgggtgaccagtcagctggagctggaggaggtgcttagcaaggcagtgaccctggttgggaggagcagggctcagcagggtgaaagtagctgggccttgagtcaggagtggcatctggaaggcctgactgtaagggtcagaagggccagcaggtgggtgtcctaggcacaaacggtggctgctgctgtggactggaggaaggtaagaggccccgagtattccatgttcttactggctccccaactgaggattcctctcctgggctggtgctgtcctgcagcagggaggggttagacagggacggctgcacatcaggccggagtccatgtcatcctcttaggcactgtcactacagattgaggattctgttcataagccaagcctttgcacaaggaagggacccgggctctcaaggaagagcagctcctggtcagacctccatctccttctctctcattgcctgaggcctcaagcttggtctacctggcacaggggtctggatcctcctcccagggttggggtcttactgagctgggcacctgcaggtgggagaagatctggaggggccccatctgccttcaccagattgatgttgagggtccctgagtcctgcaccactatcaggtgctgagcaacttccagtgtcagtgacaaccaccccatggtggaagcagaaccacctcgtgagaaagcacctccaagcctcagtgcttgccatgtgtgggaatttgctggtttcagttgggggcatgttggtgggtggtcatgaattcagggccggattctatgctcacagtgcacatgctggatgtggtacagaccccaggcagggctcagtggggtggttttgggtgtgcacaggtatcttttctggaggagctggtggtgatttggctcccagaagttcctgagctctgcagactcaccaagcactcaatatttgagtgaacattgggcgagagagcagaaggtaagtgtcagggcatcggggttggtgcctctgggaagaggaggaacattctgggaacaaagctctcccccggcttacagggagcttcccatcgctcctgccttgaggatcagggaaactagggcctctgctcttccaggggctgcttgcaggcagtttgctctgggagggggtgacccaggagttgcctctcattttgcatttgagatttaaaaggagaagggacagtatatcttgccaggtcacaaaaattacaggcatcatattgactgaagggcactcctgtcatcactgcaatataccagaatggtcttttaaaaaaataagtgatttaggtttaccagcaactgtaatgcttgttttattcttctagttcaccgttaatgtcacttttgtagttttagcactggcaatgttgattttatgttgactctgatgattttaagctttcatttgttcacatagagatcatcttctttctgaatattaatgcattttttctctatttctactggttattcctgtacatagagtagagaatcacttttcccaaggaggtggaaagcttctgactaccaaaaaaaaaaaaaagtgtcaaaatgctttaaagtcagtaacttaaagatcaaatccaagagtgggcaacagattctgcccagggtctgaaaggtggagaggtgactggtgaggatgtttaaaagacctctcctctctactccctaaatgggggccatccagtgttcttgaggttcagagaaggcccagggctggggcagcagggcactgtcagctcccagctcccaggggccaggagtaagaccccaacactgtccagacactgattgcattcattttgggggagagtagattcttatttaaagaataatacaaaagtctacaaatatgaacataaacagaaattcctttgctacaattttccccttaataagacattccttcctaatgacatatgtgactgcattcatggctgagatgttttctaggatggtgagagcatcagagtggactatctggtgccttggggtcatgcattttcttcttccaatgtctacaggatcccccatgtcccactttgtagtgtaactcagtgtgtgtcattctggtttttgttgtatagatccttggaaagcccatgtcattcctgctgtgaggtacaggcagccaaatggcatcatctctaaacatgccttctcctggtacatcaaattatggaataaatgaaagccattttgacagatattgaagatataagtttctactcttcccacacatgcttctcccaagtgaaggattttactggtgaattgttattagagattagtgtggatcagtgactctgccaggggaaattttgccctctaggggacatttggcaaagtctggaaacattgttggttgtcagagctgggggagggagtcctgctggcattgagtgggtggatggtgctgaacaccctgcagttcacagagccccaccagtttgaccacccaaatgtcaatgctgaggagtggagagccctgctgtgccctcccgcagcttccctgaagcttcccctcacctgctcctcccatgtctccccaccacttccccacttcacccgcctccttacacctcagtcccctccacctgaactcaccccttagtccaaggccagccctgatctccgctctcctggtctccttgctccttagcaggaggcgcccactagatggcgcccttgcccttactggagctcaccgtctccctttccaccctgagacaaatgtggctgcttttactgccacaaccccagccctccacactctagatttgctcagggagcagctcctggacagacctcagggaccccagggaggagcctcactctggagattttgatggcatggtctttgaacttcactgttacccccagtcaggatccaggatgttgggagtgcatgattctgcccggtcccacttcagcaggaccccactgctgagttgtctgtggggacccgggcctctcatctccttcttgcattgcaggagagggatcttagcactgctttcacataaagtcagataatggaggagtgcaggtgagtttgggaaggtggacatgaagagaggttgtgtccctagaggtggcagcagtgagaggatgggcaggtgggaggaacacagcccatccagggttgccagccatattaggagcgacagcctttcctctaagcctccagcctttttcctgaaacattccagaactttccacttcagcacttcccactgaggctcctcaggtctgtccctgagctcccagctgagcctacctacccatctgaaatcctgagtcctgtgtcaccctcgttccccattattctgtgcagttctgtgggacgcccagctctcctgacacccccagtcttcagaatggccatcagcgctgtcgctgtggcaccagggtgactgccgcctggaggctgagtcctggcttcctgacagctgtggggcccgctctaggctcccttgtcctgatcattcatcacctccaggatgcacagcagctgggccagggggaggagcagggacaggtgtcagccaccctgtgtgtctgcaagtcaggctgggggtgtgggaggacgccaggaatgactgaactttctgatttagagggtgagagcttgcactgatggaatttgggatttaataggaaaagcatagcgttttcctattttgtaggcagggtggctggagtttggaatcatagattcccctgggatgtcactgtggacctcagtcccacccgttaggggcacagatttcagaatccacaccctggggcaaagcaggcatgggaggctccatcagcctggccagggctctctatttgtgcagctgctgcaaggagatgtgcactctgatgggaacagtgctccctcctccttggggggcagtatctagctccctgcagcccctctccctgcaggccctgccctctctgaacctcaccttccccaacccgccccccgcaatcccatctcagctgtaatcccaacactttctcatccattatgggtggactgcttgagcccaggggttcaagactatgctggctggacaatatagcgagttgttgtctctacaaaaagacaaaaattagctgtgcatggtggcatacacctgtagtcccagtcactcaggaggctgaggtgggaggattgcttgagctggggaggctgagttggcagtgagttgagattgtgccactgtatacttcagtgtaggtaacagagcgagaccctgtctcaaaaaataaaagtaaaaaaaaaaaaagaaatatggaatacattattgttaactctaatcaaccatgctatgcaatagtccaccagtaataccagtaatagccaataatgaattatctgaaaaagaatacaatttattcttagctatctactgctaaaatttttaagctatcttttatgatagctgaaacaaaagaagtaaatttaaccaaggaagtaaaagacctttataatgaaaactgtaaaacattgatgaaataaattgaaaaagacacacgcacaaatagaagatattccatgttcatgaattggaagaactgatattgctaaaatgtccttaccacccaaagtggtctacagattcaatgcaatttctgtcaaaacaccaatgatattcttcgaagaagtagaagatcctaaaattagaaaccacaaaaattcctaaaacctgcacaaaacaccctgagttgccaaagcaatcttaaacaaatagaacaaagctagtggcattacacttcctgacaatcaaagcatactgcaaagctatagtaaccaaatcagcatggtcctggcataaaaacaagcacatagatcaatgaaacagaataaaaatcccagaaataaacccatgcatctctagctaactgattttcagccaaggagccacatgcacacaatggggaaaggacagcctcttcaataagtggtgctggggaattggatattcatatgcagaagaatgaacctagaccctatccctcaccatgcacaaaaaattaactcaaaatgtattaaataaagacttaaatgtaagaactgaaactatgaaactactagaagaaaatatagggggaaaatccatgacattggtctaggcaaagagtttttggataaaatctcaacagcataagcaacaaaaccaaatataaacaaacgggatttcatcaaactaaaaagcttttatacagcaaagaaaaaaaaggccagcagagcaaagagacaacctacaaatgggaggagaatatatttgtaaatatatacatatatatttgtaaatatatacatctgataagaagataatatccaaaatatataagaaaattatgtttctgtatagttttatctgactgggatacagaggccacatccacagtcccatcctcaaaggccacttgttcccaaaatgtcaagcacatccctcaatgatccatcatcaacacctatgtctgtaggatgaagggtgaatcatgaagcactaaaaaggaagaaggaagccaatcccaaaacaaaatgatgcagggtctggaaagtccaaagcattttttttttttttttactgcatcttcctcctttcttctccacattcccaatcctcactattgattaacaaaacaaaaaaaactgggacccaccatcttccctactgtcaggagatctagcgagattgtttgagtcttagaccaaactttgccataagccaaatttctggctgactttacaatgatatgagctagcacagtctctttttctgccagtcaacttgtgctcggttttatttgcaaccaaatagaggtggtaaccaaatataggtgaccctaaaattagtcatcaggatgaaatcctaaaatgtgcaacaaactgggttgaattcaggattagtagcaacatctctgttgtgggcttgaaaagggggcacccttttatgcagtagcaaaattgctaaattgttgtttgctgagtctttggactctcatcccggattttctatgaccattcaaacagggctgcaatgaacatctatggttgtttagcttggcacacttctacatttctatatagtaatatctagaagtgcatttgctcaatcacaagatatgcacattttataattgactgctatcgaactaccttaaatagccttaatttgttctcaacattgtttaacagggtctgtttaatgtcctacgtccagcaaggacagtatcacttttcttaatatttttcaaattattggaccttaacaaatacttaatgtgcaattaattgattcctttgtattcccatgccttcttttatatgtttccttatagtacacaaaaccacattattgtttctttacttgtgtcattccaccctggaccattcctatctaaactataacattatgagagagagagagagagaaaacaatatgaaaatataaattgattaatcaaaaaaatttaaataggacaaatcaggaagacacaagagagattttaaaattattcagagaataccacaatagctgtaccaatatattttaaaacttagatgaaacggacaactatctcgataaatgtaaattaccaaaactgactcatgaaaaaatggatattatgaatagagcaataatcagtaaagcaattaaaaagacagttgataatttttatttactgacaacaataacaaaatttcaggtcctgatatttttatggtgaattttaacaaattttcaagctcctcctcaaccaattctcagaaggtttaaaactttaacaagaaaacactttctaacacattttcagaagctgttatagcatgataccaaaaccacacaagaaaattatagaccaatctcacttacaaatatacatgcaaaatcaaacaaaatcttagtgaaccaaattcagaattaataatagcaaacaagcaaaatatgttatcatacgtatggcttatatcaggaatgcaagtatgtttcaacatcagaaaatacttctccacattaacagactaaaggagaaaaacgcttgtttaattatctcaataggtttttagagaattttgaaaattttataaagttatgcgtattctgtaaaattgatgaaatccaaccttgatttatttttaaaaattgcctttcctatagaattataggtaaaggaaacacatgcatcctcacagagctacttcaaggctaagttacttcccataagtaacgtatcctgtaatgtgtgcttggcacatattcaatactaaacaaatatttgcaaatcctcaaaccacttctcgctcaaataacccacctttgtcttttgcctttatgttagggttgattttctcaattgtatcttggagatcctttggtgggtctttcagcaattaccctgaatttgcttttctgtttacaattttaattcctgggaactctttcttgttctctgactgcacccttttcatgagagttcagccatcaatcctccagaaccccaccccccccgcccccccaaaaagcaataaagatgtctaaaagcttccttctgggctttcgaatgatgtttaccccaggcatttgttctattcgttcatcacccattttccctacaacttgcctacacttgatatcagatttttatttattagtcacctatcttcttcattggcccattttcctattttgccactggttgttctcaaatgtgttatgattcctggttgtacagtcaagtggttgataatcttggatatacgataaagatttgctctgtagctgtgtgtaagcctatataaaagcttttgtatttttcttcttaaaaaagacaaaagatggttgggaagatccctccagttcaccagttcgaggctgcagtgagctatgatagcgccgctgctctagcctgtctgtctgtgaaaaacaaggggggcggggggcgggggggaagactggagatgtaaatctcccgcagggccctacccgtatccgcaacaggtctctaacaggaacagcctcaggcctgtgttggaacaaggtaggttacagaaatctggaagccagatctgtaacttcagggtaaggactggctctcagggctgatcccccgggctgggtgtcccagaggcacccgcccccgccccttccccaaggcaggccaggacaccttcactcctctccttaggctccccacccccttctcctccccactgtgcctcctggagtagcggtggcggtgccacaggggagcggggcggggcgggctctgagggcaagggggatgggccccgccggggtcactggcggccaccctggaaactcgacgcaggccggcccttctagtgaatcgtcccagccacagctggcctcccagccgcgcttggggcgcctcggggcgcgaatggtgcaggttggggagactcaccacgcaccgtcgggggtcggtccggttattcctcaccgctcggctccagtgggcgcgcgggcctctcctcctcagttcctgcgctgcagtccctccctcacccttcgcagcttgggaatccaactgtgtcattccgacggagcgccgtgaggacctccgagggtgttagcgccaagtgatctctgtccagcgctctgaatatccaagtaaaggagttcaatgaagggcgggtcaacggaggagaaaccgtgactctctcaagggagcccaaggcctccttgtctaattagtgacgcgccaatggatggaggctcttcccaccatctcttcccagcatccagtgacaccaccgccaagggacgggctcggcggaacctgcaggaaagaagcatcggctgagcctgactgcagcgctgtgaagagacaggggaggggatcagtagttggtcccgcgcccaccccctgtttccgcgaggggcggagttgactggccatgcaggcagagggcgaaatgtgaaattccactactcctaccgtttttccctgacccgatggggcggagtgtcgtcaggctaagttccctggcggtaaggtggggagattgaggcgcacacctgccgaacggtaacgcaggattagctaaggcgagctcaggacagaagcctcccgaggagcaggagggcaaaataataaataaataaataaataataaataactcactccttggtctttatttgcggcaggaattcagaaggtgaaagcggggccttaggatctttctgaccttttgggttttaagcaggaggtgtcagaaatgttaccacagggctagctggcttgtggccagcaagcgttcacaatgccctcgatttttcatccctctctgtgggttctttttttcattgtaaggcagaatttctacgattgctcacccactcagagaacctgagctggtttagaccaggtgagacaggctaggtttaccctggtgatgatgtgttgttgccatggcgatcctgcccagtaccagaggccctgcagattcagatgcttggtgcctgtgcttggctgaggggccaatgggtgaagctgccatctgcgggatgatgactgaagcctctaagtcagaatccgcccaggctgagccttagggcagctccatggagcctcggctggcctgggatagagagtccaccactgtgccagcccccagccactgcctaggtcctgtgctgagagccccttgtccagggaaatggcgtccagtggaaaagggaccacccccttgcccttcactcaaggcaggttggtgacaaccctgaagctaatccgttcctagaggagctgcttctgggtccgagttttctctgcagcagagcagctccctggatgggatctgttcaaagtccgcctttcacgcggaattttccgtccttgcaattttccacctccaccactaggggatcctctctgaccgcctcatgccggctctggcctctgagcaggggtttctcttctgcatgtgcgaccttgcgcatgcctagtggccttttgggacctagagctgctccacaccccgatggggttacagagtgcctcgcctccactccaccccaccagggttccttccctggctgggatgggatttcagaagcgccgaggaacagcccagacaggtgtgggagagtagccaaggcccctgtcccggggtggccaggacagcggtggcctcgcataggacctggctgggctgctgcaatcagtgtcctgccccttggagagcaacagtgaaaacaacaagactatcttcacccaccttaagaaagaacagaaccagtatccccaactctgctgtgtatcccaacccaattccattccccaccccactctcagtagccaatatgcaaaatattagaatactcttactgttattattttcaaccacactctgcatcctgaaaaaccatatatttcgttatgtgcttttaaacttcttgaaaatgaaatactgaggctgggcgcagtggctgacacctgtaatcccagcacttcgggaggcggaggcaggcggatcacgaggtcaggagatcgagaccatcctggctaacacagtgaaaccccatctctactaaaaatacaaaaaattagccgggcgtggtggcgggcgcctgtagtcccagctacttgggaggctgaggcaggagaacggcgtgaacccgggaggtggagcttgcactgagccgagatcgcgccactgcactccagcctgggcgacagcgccagactctgtctccaaaaaaaaaaagaaaaaagaaatactgaattttcaaatacttgctttttttttcggtcaaaattatgttctcaaatttcactcctgtagatgtgcgtggctggctgtagtttttgcatttttattattaggtattctcctgttgcattaatatgccacattttatttctctcatgtttttggtgaccacttggggtgttttttggttttgtatttttgctgtatacatgctgccatggtggacatacctctttatacatatttcctgttgtatgcagacacaattttaggatgtgacatcttcagcttttctattgtgtcgtgtgtcttttccttcgtgctttgtgttatttacatattctggacacagattctttgtcaactgtatgtgctgcacatctctttcccagtttgtgtcttcttcttcttttttttttcttaaaaaaaactttctttatagtgttttttttttctttctttctttgttttgttttgtttttttgagatggagtcttgctctgtcacctaggctgaagtgcactggccgatctcggctcactgcaacctccgtctcctgggttcaagtgattctcctgcctcagcttcccaagtagctgggattacaggtgcctgtcaccacacccagctaatttttgtatttttagtacagatggggtttcaccatgtttgtcaggctggtctcgaactcctgacctcaggtgatccaccctctttggcctcccaaagtgttgggattacaggcgtgagccacagcacctggcctgtgttctttcttaagtagatgttacttttaatataatagaatgtatcatattttgcttttatattagtactttttctatctaattcaaacacatccccaagggtctttgtgtgtagactgaccaatttctcaagaatcatgaatgaatactgcttctctttccccaatttatctgtaatgctacctttattataaagtttctatgcatgtgtagaaatagttcctgatttttcactctgtgccaccagcataccaatagcacgctgtcttaaatattaaatagcagagctttatgagacaacttgatgtgcagtaggcaattgcccccttgttactcttcttcagggttctttgttgtaccacatgaattttagaattggcttgtccagctaaaagacaactgcaaggattttatttggaagttcataattctatacataatttggggaaagtattttcataataccaagtcttcctattaatgaacacagactctctctctctctcccccacccccacctgtttagttatttatatctttatggtctgttagttattgtttattgtctttcaaccaggtttcatgtttttctacatagaggccttgcatgtgaaagtctttcttcctagcttgctattacaaattttttttaattgcactttttgggtacagtggcttgtactgtaatccccgatacctgggaggctgaggcagatggattgcttgagtccagaagttcaagaccagcctgggcaacataatgaggtccctgtctcaaaaagtttgttttaaaaattgcatttgctgttattcaacaaatgtcattgtgtctcatatatggatttttatatctgataaccttgttcaacaatcttttgattctaacaatatatcagattcttttgagttttccatatagacaataatgtcatctgtaaattataattgtttcttctttgttatttcttggaccttttattttatatttttgtcttgctgcaaggcaatatccctctatatattgtggggtcttttttctcataaagtggggatggtgaacacccttgtcttgctctctgattgtataaagcatgctttctgtagcattttgtagacgctcttttttagattgaggtaattcacttttatttctggtttactgagtttttagcataaattcaggctgaatttgagctaaagctttttctggagacatcatttgaaaaattcatatgatttactttctttaagtcaccaaagttatgatttacattgaactgagtttctactgtttaactgtattcttgggagaaaacccacttgtcactgaacaatatctgttttatttactgctgtcttgtgtctaaattttcttttaggattttttgtatatgctcagattagcctgttattctcctttctgtatttttttctggtttgggggtcaaagttataatagcctcacaataagagctaagaaaccagccctaatggaggccggggcaggaggtttggagttcaagaccagtctgggcaaaatagtgagacccccatctctatgaaaaatagaaattagccaggcatggcagtgagtacctgtagtcctaggtacttgggagggtgaggcaggaggattgcttgagcctaggaatttgaggctgcagcgaactatgattgtgccactgtactccagcctggatgacagagcgagaccctgtctcaaaagaaaaaaaaagaagaaataaaaaggaaaagataaaagagctaagcatctgtttccttttttccattttctgggagagtatgtgtaagactgtaattaactgtttcttgaataatgggagaactctgtaaaataatctggctttggtgttacctgtattggaaggatgaaaaataccaattcagtttcattattggttgatagggctactcatgctttttgttttgttttgttttgttttgtttttgagaggaagtctctctgtattgccctgttgtccaggctgagatgcaacgttgttcacaggcctgatcctggctcactacagcttctaacttccgatctcaatagatcctcccgcctcagccttcccagtagctaggactacaagcatgcagcatcacatccagcctcttttcctgcctgacccagttctggtttcctttagttttctaggtgttcatccattttatctaatgtttaatgcatttggcataagggtgctcagtgtcctttcattgtctgttgtctgtaactgttgccattttcattcctatttatgagtactggcgtcttctctcactttttcttaataatcctgctggaactttgctttttaaagaacatcttttgacttgttgattcttttttcatacatattaactattttcttattttttgcctttatatttatttcttttcctgtttgaaacattgctcttttcttactataaaaatgggtaagtagctcatgaattaccacctcttttaaaaatcttttctactgtaagcattttagcagtttacatttgcccacaagtaccacttcagctacaccctatgtgcttttacataaagtcttcatttttggtaagacatattctcaaattttaattatcacttgtttttaaatccatgatgttttatttgaaatgttgtttctaaagatacattttctggttatacttttattcttctaatttagcacagtggccacaaaacatggtctgtgcagtgcatacaatcgatgagtaatttctgagctgtagtatttggcataatatatggcaaaatttcctaagttttccatgtgtgctttaaaaaacttccagtaaaatacataaatctgttagatcaagcttctcacattgttcaaatagtctatatgtttactgattcatttgactgcttgatttatcaattacaggtaggaatgtattcaaatctcctattaaagtgtgacactcaagtggctttttaaagacagagatgccaaaccaatgaatacatgattttccccaaagcctgcacaaattctctaatgaaattttaccatgaaagtttgtttaattaaggcttactaaagcagtatgttgtcttttactttttaaacagagaatatatattttaatacatcgtttaagtttatgattaattatctattactgaggataagaatctttgcctgtgctcattcagcatttgcacttcatttatgatctgccttctcatagcttctgttaatttttatactagagacatttatttgtttgtataaatgttgaaggtttttttttgttgttgttgtttttgagtcagagcctcgctctgtcacccaggctggagtgcagtggcatgatctcggctcactgcagcctccatctcctgggttaaagtgattctcctgcctcagcctccagagtagctgggactacaggcatgtgccaccaagcaaggctaatattttgtatttttagtagagatggggtttcgtcctgttagccagggtggtctcgatctcctgacctcatgatctacctgcctcggcctcccaaagtgctaggattacaggtgtgagccaccgtgcccagctgggttttttatattataaggagatgtaatagatagatagatgtttcaaagatagtcaaatgtttttaaaatttaaaacacttttttacaggttgactttcaccatttaatttcatctatgtgttttgccttagagaaattttaaatgctatgtagatctcatgacttataattatgaagcattttgttttctgttttccacgaaacttagcttaactttgagcatataatagttgtaaaggtaggagagtaacactgaaaaaaggaattgcataaaaatggcacattttctgtagagttgtttatcgcctgaaaataggccccatttcatggaagtaagatgatcaggctcaggtccccagacgaaactcttggcatggtttttggagatagtccagggctcagtactggctctatcatttgctacttctcccaaagtaaccaatatctcatccaccctgagcccatttccatatctctaacatgaggataatagcatctaccttacacaccaagtagagggatcaaatgtaggaactaaatcaaagtaccagcactgaataacctacatcctcccacttcccaaaaggaagagagatgtatcccctgttgacaaacgagaccattttgcaggagagaaaggaaatgccagttcacttgcaatgtaaacatgctctctctttttagggatgtccagggacctgagagagaacccatgcttaccaaagagtttctagttccagacacacaggactcgaagggtgacaagtatggttttcagggtccctgaatccacccagtcctcacagaaactcctaaaagctgtcgattgacagcgttgagttcacagctctggtcctcacatgctgatactgcttgtgatatcgaacccgacaggaccccacatcacaattgatttaccaactacaatataatacctcctgaatctccaaattggctcacccaggaacaaaggcttggggtaaaactggattaggagatataagctctgaattttctgagggtgagacacacaaggattctaagtgacacgccacagagtaacgggtctgtgactggaggacccacagatttgtcttactggagacaccacatgcacacaaactccatccttagctgtggaaacaagggtcttttgctatcttagccgaattctgggagtaatttttggaggggaggagatctttgggattgcctctttcaggccctttacaaaaatacctacttcttaaatggtaaagcttacactaaactgaaaaaattacatccttggctttttatgaagtaggtgttggattgaatcactactggaagaagtatggcatcgcaaattctaagcagtggtcaaaggatggatctgttaaattagaaaaatctctaaatttataaaaagattttagattcctttattctaaacaattgacctatttgtactcatgggacaatcaaatttcaaaggagatatgtaacgatttcatggcttgcattaaaaatccttctgataaaattaaagataaaaaatctgaccccctgccaaaaaaatcttttgaagttcatactgcctgctttcaatattctgtgggattcacaatgaaaggtgccttatattgtggcctagcttcaagtttatgccttcgccaccatggcctgggttcaattcccagtcagggccccagcgcctttggtttaatgtttgcgtggcatttgacttttttacctatttagtattggtgagattacctttggtaaaaaaaagtttaaagagtggaaatcgcaattctttgtgttggctaaaatctgattataagagatctggaaggttttatttttctttttcaaagagctctatggtcagaagtcggcttcatgaaaagctaatatttaattatatgtacatacagtctttctggattttctcttttgcctcctgttttgaaaaatatttggatttgagtgaaactccgttttagaaattaattgcttggtacaatatacccatgtaactaccctgcacatgtaccccctgaatctataataagagttgaaattttgacaaaataaaattagattttgaattaaaacaaataggtgcttggttcctctgctcacttctttttaaaaggaattcctctcccatgtacttcttcttttcccttctttaccttccttttggcatctttggtatcacatgaagggatctagagggaattttaagtgactctgaaattccttgagaaatacacaaaaagatcccactcaccccttttgggggtctcctgttctccttgtggagtccagagtcagggacaggctcctccaggtctgcagctctgctctcttttatttcatcttggctgattgctttggttttgtgagtaccaggcattactttgtactgtgagagacacgtcctttgtgagtgcaacggctgctgggtcactggtgagggctgcagtttggagatggctgagagccgttgcaataaatggttgtgattgcagggggctccttgtttctttgcaagtttagatgagaaaggtgcagtttggacacagtttaaaggctgtgaaaacaccaccaatgaatatgatttcctttggggatggtctgattaaaagtgggctgattgttgctgtgctactagccttgaagacatgtttctacagcattgtgcagtgtggaaaaattgtgtggcttggtcttgtggcatgtcccttcttttagagacctcagattcaatgtgaaattcgggatttttgattttcaaagatctagatgccctgccttccagatgtgcctactcttcacatattttaaaattagatcctataaactgcaaatactttgttggcttctgtgagatcagaggtccagttagaaaaggaagacagtttgttaaaattaaaaactatttatctaatctaactagattggcctccaaatatgactttctgacattcagctggttactctgaaaagatttctaaatctcttgaggctcatctatatgtttccttgcaaagaaaaaaaaaaaaaaaaaaaagcaagcccaagcactagtaagaaaaagatttgcaatgtttcatgaaaggagtagatgagtgaagcatttatttgtagatactgggttggatacctgtgcaaagaagaagaggtcaataataaaaattgccaggggatttcttggaacttaacaagctgaattaaatatagaaatgtcaggaaatcaaggcaggaaatactcacttgtggttaggcagacagggcagggttctgagcttgagatggagcaaacagttgtggtgggtgaagttcacatgctttagagctcagctgtcctagtaaagaagcctaagagtctctaaagctcttatgagaagatggattttttttgcctagattaaaaggttaaagaattgctttaagttggataaaataaagctaaatgtttaagcaagttgtgaaaggtttatgaaaaaattaattaaaatatttttgtgtgtaaacatattgactaaagttgaaggggtataattcagcatttctgtaaattgagcattgaaataaaaacacaatgggtttctcttagagcactaacctgctctttaacaaaaattgtaaagggttatagaaagtctataaaaatgttaccttatggtcaaacattaaaattgggtaaatatgtctatcaggttttattaagaattaggtttaacattaatagtacactaatgtaaaggtgaaatttggcttatttggtacaaaaatcatacaggaagcattgtgaaatataaaatgatttttagctttctttgggctatatttctataaatatgttattgatgagggttccaaagttatgggagactcctataattctgctatatctcagtgtacattatcagtcataattataattgtcatgttaaattattgtgggccacagaggtaacagatttccttgtcaattgtgtctttgactatgactaccctaaaacgttcagtcacccatatacacatgttaccttgttttggccctctttagaaggtaattttataatcagctataaagccctaacaggtgctcttaaatgcaaattttgataactttggagattgtgacatcagaagagaggaaaaatgttcgggacacttggagagctaaaatgttcattgatatcaagcaggacaggaattaactgcatgaagtgaactaataggaggctgaagtgatctttttgactttttgcttaaaacgttgctgatcctttgttttgcttttcagagtcaaggcaaattttcttttgagctattgacagcttttaacgattaatcaaaatatactcctatgaacaccatttggagcattatttgtttctctctacccgatttccccagaatttggaaactatttgtgggtattcttaatttatggcaatatagttatttgcataagtgcaataagaatgtgttttctttggtaacaggacacaatttgaaaaactggttattttaccaaggttttgaccagaatgctgtgctttcctttaaggaatcaaacttgacttgtggagctaataaagcctttggaaaactgaccttatatcctgtgaacacagtccctgtacagggttactgatctgtgggaagaaaagaatgtcacattctgacaggtcaggaatcccaagttatcttgaaacttcaagaggacaggaattcacccaaccatatgtatttgatggtagaaatccatggcaggggctcagctttaaaaagtcttatctcagattccttctataaaacaaagtcccattaaaaccaattttaaaagcctatgtgaaaaataattattcttgctgcacctcgtacaaataaagtggcaaagcataataaagcaaattggtcctgtcgtaatttgtctttagtaaaaacgggaaactggggtcgggtgcagtggctcactcctgtaatcccagcactttgggaggctgaggtgggcagatcatctgaggtcaggagttcaagaccagcctggccaacatggtgaaaccccatctctacaaaaatacaaaaatgagccgggcatgatggcgggtgcctgtaatcccagctactcaaggggctgaggcagggaagcggaggttacagtgagtcaagatcgtgccacttcacgacagcctgggtgacagagcaagactccatctcaacaacaacaacaaaaaagggtaactggagagagggaagttatgtttcaaaaacttttggaaactatagtacacctgtttttaaattctagtctggcattcagtttttattattttctacagtttgggttaaattcgtatttctctggctacaagtctcctaaataatcttttcatttgtttcctttttctttccctttttccccatttttcttaattggaaatcactgaaacctaagctgtgctttcttaaagccctgtgaactgaagactagacaaccgaaacttctgaaggaagtagcagcaacctatttatatgtgttgctgttgcctactattatgttttagcaggtgctgcctctacacccccgaaacagagagtgctactgggaacaaatcgactttttccactccagtgctgcattcggtgccccataacgatgaccccctctcagcaggaagtagccagaaagattacaatgctccatctccctatgattcttgtgataaataaatatacaagcatgatagaaatcatgcgcaaattgacagtggggattgtggcaggccagatttcactaatggaggtccccatcacaactacttcagtactgactgagtggttaagttcagtatcaaaagctgaaagtgccagcgcctttctacaaaggctagaatgtaacaaaagcccaccaagggttttacctaggcctttcctgggccttacagcatgacaaaacaaagaaggaattcttaaccagacctgtttaggattaaacaaatttaattgggggtctgaagaaactcgccaggcctccacaaacaagttcattgggggtctaaaggaaccccccccaaacctctgtgattgagcaggagacaaggtcagggtaattgccccagcacctggactcatttagatttaagtaaatgtactgaggctccagagaaaggtctccaagacttagactagagttacagattaaaagaagttaatcacttatatctttagataaatgcacactgacacgtagacatacatcttagaaaatatataagctctggaaaaccttgtaatttacagttggtctggagatattttctgggccttctctctgtaaccggttccagaaataaaaaactctcttcctccccagtttatctgcatctcgttattgggccgtgagaaatagcagccagaccctgagtttggtctgggaacacactggctgggcttcctgcctggcggtagagcttcactgtcctccttcccagccaaaatgtggcccttgaaggcttcctccccaactgaccggttttgggttctaggtactcagggaacaccgtcttcaaggaggccattttcatactgttcctggtttgatttttctgaaattaggaaatgccccttgaggcatccaggattgtctttatttcccctgaagcttcccctcctgaagaaaaaagttctcaaacaccctcaggactcaaaccccaagttcaccctgtgaaacattcccatttcctaaacccaggcaggctcatggccctcagcctctcagaccccatggaaacctcctcccccacttcacgggttctctccatattgagagcctcccctcctcggcacacaacccagagactcaccccaacatgtgtagcaaatcaccctggaaacaatcatggctgaacgtggtagcccatgcctgtaatcccagcactttgggaggcccaggaggtggatcacctgaggtcgggagttcgagaccagcgaggccaacatggtgaaacctcgactctactaaaaatacaaagttcactgggcattgtggtgtgtacctgtaatctcaactactcaggaggctgaggcaggagaatcacttaaacctgggagacagagattgcagagagccaagatcgcaccattacactccagcctgggcaagaagagtgaaactacatctaaaaaaaaaaaaaaaaaaaggaaaaggaaaagaaaaaaaaaatcatgaggcaacattgcatttaacaatattttatttatcaaaagacacttgtctttctcaggtaagtgaaggtctagagatgaaacgagtcccgatgtaaattgccccatgggcattgctgagatcacaagatcatcactgcagcatgcagcacaatagtaaatttctcaggatggaagttcaacaatccaaaaggtagtattttttttcatgatgctcagtccatcatacgaaataaaaataaattccttttcatgatcatccattcagtagaaaaaatgatagtaaatttgttctcatgaagatttttaccgtaacatataggatttatcgttattattattattctttgttttttgtttttttgaagcggagtctcactctgttacccagtctggagtgcagtcgtgcgatctgggcacactattaacctccacctccagggttcaagcatttctcctgcctcagcttcccgagtagctgggattacaggcatgcgccaccacacccggctaattttcgtatttttactagagatggggtttcaccgcattggtcgagctggatttgagctccggacctcgggtcatccgcccatctcagcctcccaaagtgctgggattacaggcgtgagccaccgcgcccggcctcaatttatcattattcacgcatccacaaactgggttcttatattttgtacgtgattttttccattgaggagagatatctgtgcatattcatgctgctcatatttcatccacaaactcggttcatatttcatccacaaacataattttttccgttgagaagagatacttgtacatatttatgctgttcaaattcacatttcatcattcttttacaagaaatagataatgtattttaaggttttccagtggtattacagatattttactgggtgtatagatagaaattaaaccaaacttctttgttctggccgccagtcatgcatcctgttttcaacatagttcacatacaactggttgtgtaaaaatgaaattattttgtttagtacaatcatcaacagttggttgattagatttttaattatcaagttaatcattgtcattatgcttctcatcgcactcgtcattaattgctgtgggaggaaatttgttatgttccctatgagagggtgtatcacaaattcaaataagaattcaacgacaatggactgtataaaggaaataagcaagtccatggaaaacatatttttttccggaaaggattaaaatatttttaaaaaggaattaaaaaaaaattgggcacggtggcaaatgcctagagtcccagctgctcaggagatggagacagaaggattgcttgagcccaggaataagttggaggctgtagtgaacagtgattccaccactgtactccagccagggcaatagagggaaaccctctttctaaaaagacaaaaagaaacaaaacaaaacaaaaaaacaccacatcaaaaaacccaacaacaaaatgaaaaaccaaataacagcaatacaattggagctattcgatccaaagaagtaaatgaaacataaagcaaataaaagagaaaagctaatacctgtgtcctgcaggactcagtccaagttctgctctgactccctcctggtgagccaccccttaaaaagtcacttggggcggggttactttgacagacagtcttctgtcaaagagggaggcggtaaatagcacttttttttttttaatttaacgcctttccaacaaattagcggctatgttgtctaagagtgcaaatgtcagaggtgggtacaggcagcaagaccctccccacaggggcagcagaaggaggaatgactaagggaacaagactttagtgtgctcaactacacaggacaggaaacagatgctttttacaaaagctggtggacttgaaggcagaatattttcaagttcctgtaactgcgaactatgacctgtagcctgtgagagtgactttctgtggcaaaggagcttttgtgaatgtgaggaagttaattatcttaacagtgggaggttctcccggcttatctagctagaccctcgtgaaatcccaagtgtccttaggaaggggaagcagagagagatttgagtccagaagaggaagaaggtgatgtgaggcccagtaggggaacaaagggcgatggcatgtaaacacttagcccccagaagtgggagagggctggggttcatcacaccagaatccctaacaatcagccttattttaattacccttgaaatggaaggaggccttagagagccagaggcttggaggggcaccctctgctgcatacacagatcccaactgctgtgggctccaaataattgcaccagggaaatcacaaattatcaaaaataaaggatgtaaagcttttaaaaaatattaaaagcccaacaaataaaaaaagttctaaatctataaaattgacctcagtctgtatatttagatgagtcatgtgtatatagcgtttcacttcaaaatatatgataaatctctcattcattggcttaaaaataaacacttcaatcaagtctttatcagaaaaattgaaacgttaactcaattgccttttagttcatgtgactttacaaaacttaaaacaataaagtcagttttaaaaattattagtaaagtaaaagaaaaatatcttcacaatgtagacattttgtccacatgagacatgtgaaatattgccattactaaatatttgcaggtcaaaaactgtttccaaaacattttaaataatcatctggcctgtctgttttagagcattcaattctagctgaggtctggggacatgtgaaaggagccacggcccgactccgtgctgggaagagtcagacattttccacagctctgtcctttgctgtgggctctgcaactcctaccaattaaaattgcttacgtttttgttttatttttactaaagaggggttcctaaaagctaacattatactgagtatatgtaactaaaactactaagaaaacaatttcacaattatacaaatgtgccaagtaaatgaaaaaataaactgtattttaataaaggttataaaaagaaaaacatatagtggtgtgaggactgtctcaggtcttcactgagcaagggatcatgacattctatggcggacagctgaccttggctttctgctcctcttgattatgtctactaagtgacatacttactctttttccacctgtcttgcctctaagggtaacaggttttatgagatccctcctagtgctttgcaggtcagcctccctttgctgcattccaattttactgcctataccctccagctggcttttgatgacaaaagtcctggtcccagccattctcagattctgtcatccccgtgggcactatggagctcagcactatgggaggttccccaaaaatctcgttttctatgaggaatggccaccacctgcatctcagtgatgctagtgacccctttcctactcctgtgctcactggtcctcatgaagatcctggttggtctgtagccccctatttttcctattaaagagaaattacagtaagacccatttgtgtgcaaaatcaattttaggcttattacacttggcctgataatttgcataaaatgcagcaagaattcatcggccatataggctacttttgagttaattttcctgggtttttacctaaaaatatactattttggttagagtcttgtgaaaataaccaatgtgttcaattgttttattttaaaaggctcttactgaacactataaatatgtataagttgaatatacaaactatattgtcataaaatcacaacccaaaatgtggagaacgcagagggaaaggtaaatttgctcgcaaaaacatacttcacccaaataactggaaaaaaaaaaagactttcatgacccttctttaaccagagcagcagctttcaaacaaggtgtttgccttggaaatgccattcacaagccaaacggcccttgagagctgtctgtcaggcactgtagaatctagcagctcctcacagagttagaaatagtttcaggaaagagattccctgcttttagtaactgcactttatattcccagatagcgagattgtatgtaaaccatttttatcttattctggaactcttttgggtactttttttttttttttttaaatgatggagtctggctctgttgctcaggctggggtgtagtggtgcgatttcagggtatgagaaaatgcagctggacctggctctttccaggaagaccctcacagccaaggagtccaaagcctggggttttcatctaattccagtgtgactggggtaggagcagctttggtgctgggtgtgtgtgtgtgtgtgtgtgtgtgtgtgtgtgtctatgcctgtgtctgtttagggtgttaggctcgtggttgtctagatacaaatgtcccagggctcaggagccccagggttatgtcaggggcaccagatgaaggtgtcaacagaagttagggcacaagggacaaaggtgagagcaaggttagattcatttaggtgcaagaaatcatagagggaggagggagaggaagccctcctgctaccaccgaggaagaagcgcagcttaaggcagaaagcctgtccggagaggaagtgagtttgagggcagggctctctgggtaaagtacggtctgggacaccagcctgggggaagggtacagaatgcagagtggcctggcgtggggactaagaacagaggagagcagctttcactgggagggtcagtgttttcagtgtccagcactgagcaaggtgagatttgggcagcttgctgtgaaataaggtcaggctctggcattgtccccattgcgtgtgtgtgtgaggggcactttgggagagtgaactctccacctccatcctctcatacgtccttcaaccgagcttgccagttaccctgattccaaggagatctatttattgttgacaatactggatcctagcagaggctgggtaggagcctgggcacaagcaagtggaggagggggcctgggcctgaaagacctgggaggtttgagagaggacacagcccacagaatggagcagatggggtagagtcggcaagcattcagggctcctagtaagttggacaatggagaccctgaaagatccagtaaaacggggagaacaaacaggtccccaactcacatccttgcagtgcctggagcttcagactccagacaggtggggaaggaaaattgagggatgtgaacatgttggagaatgtcgtgccctgaagaatgaagaaaaggggggtgaggaatgagagcaggaacggcttccagtgcctggtgcccaggagaactcagaaaatgggtgtggtggagaggaatcgaggaaccggaagtggtggaagtgtgcagggcccctccgagatcactgtgactgccaggcgtcctccctggctggagagcttcactgtcctccttcccagccaaaatgtgtcccttgaaagcttcctccccaatggactggttctgggtcctatatatttgaaggggtggcctgcctctccacacctgtgggtatttctagttgggtgggaggagagacagagaaaagaaataagacacagagacaaagtataaagaaacaacagtgggtccaggggaccagcactcagcacaccaagggcctgcaccggcaccggcctctgagtttcctcagtttttattgattattattttcattatttcagcaaaaaggaatgtagtaggagagcagggtgataataaggagaaggtcaatgaaaaacatgtgagcaaaagaatctatatcataattaagttcaagggaaagtactatgcctggacgtgcactcaggccagatttatgtttctctccacccaaacatctcagtggagtaaagaataacaaggcagtattactgcaaacatgtctcacctcccgccacagggcagcttttctcctatctcagagttgaacaaatgtacaattgggttttacaccgagacattcagttctgaggggcaagcaggagacagtggccttcctccatctcgactgcaagaggctttcctcttttactaatccacctcagcacagaccctttatgggtgttgggctgggggacagtcaggtccttctcatcccatgaggccatatttcagactatcacatggggagaaaccttggacaataccccgctttcaagggcagaggtccctgcggctttccacagtgtattgtgcccctggtttattgagactagagaatggcaatgacctttaccaagtatactgcttgtaaatattttgttaacaaggcacatcctgcacagccctaggtcccttaaaccttgatttcatacaacacatgtttttgtgagctccaagttgggtcaaagtggctgggtcaaagtggctggggcaaagctacaaattaacaacatctcagcaaagccattgttcaaagtacaggtctttttcaaaatggagtctcttatgtctttcctttctacatggacacagtgacagtctgatctctctttcctttccctacatatattcatggaccacagtcttcaaggagtccatttcctcactgtttttggtttgatttctctgaaattaggaaatgccccattgaggcacccaggattgtctttacttcccccagagcttccactcctgaggcaggagcttctcaaacaccccccaagactcaacacctaatttcaccctctgaaaccttcccatttcttaaatccaggcagggtcatggtccttagcccctcagatgctgtggagaccttctttccctttcatacattctctcaagattaaaagccacccctcctcagcacacaccccagagactcaccccaacatgcattgcaaatcaccctggaaacagtcataagaccacactcatttaataatattttatttatcaaaagacactctttctcaggtaagtgaagttctggagaggaaaagaggagtcctgatgtaaattgccctgcaggccttgctgagatcacaaggagattgttactgcagcttgtagcacaatagtaaatttcttctctggatggaagttcaacaatccagatcgtagtatattccttttcattatgctcagtccagcaaatgtgatgataacaaattccttttcatgatcatccattcagcagagaaaatgtttgtaaatgtgttttcatgaagatgtttaccataacatacaggatttaccattatcaatgcatccacaaactctgctgttgttttttatacataattttttccatcgagaagtgatagttgtacatattcatgctgttcatatttcaaccacaaactctgctggtttttttatacgtaattttttccattgagaagtgatacttgtacatatttgtgctgttcatatttcatgtttcatcatccttttacaataaataggttatattgtattttaagtttttctaactgtagtgcagaaattgtactgggtgtatacatagatatcaaaccaaatttacttgttctggctgataatgcatcatttatttcatagattatgtatttctttgacacatttcacgtacaactaattgcataaaaatgaattttcttttagtatagacatcagcatgtgcttaattcggaatttaattgttgagttaaacatcgtcattgccttttccgttgttattaattgctctggtgggaattttgttatctcatacataagacagtgtgccacaatatctcttaaaatttcaatggcaataaactttatatttaaaaacagggaatctatggaaaacacatttttttctaaaggattaaaatatttttttaaaataattttctaaaaagttaggcacggtagcaaacgtctagagtcccagctactcaggaggctgagacaggaggattgcttaagcctacgagttgggggctgcagtgaactgtgattgcaccactacattccagccagggcaatagaagttaaccctttttctaaaaaaaaaaaaaaaagaaagaaagaaagaaaaaaagcaacaacaccaaaacctcaccaacaaaatggtaaagaaaaaaaaaacagcaatacaatgtaagctatttgatccaaagaagtcaatgaaatttaaaacaaatgaaagggaaaaagtaatacttgagtcctgcaggactcagtccaagttctgctgtgcctccctcacggtgagccacccctttagaagtcacttgggtcataagttaacccgataggaagtgtcctggccaatgaactagggaggtggtaaatggcaccattttaaatttaaattcacggccttttcaacggatcagtagccatgttgggtaagagtgcaaatgtcagaggtgaaaagaggcagcaggaccctcccctagtgcttgggcaacagaaggtggaatcactaaggggacaagactttagcatgctcaagtacacaggacagaaaacatgctttttacaaaagctggtaaatatgaagagggaacattttcaagttcctgtaaccaagaactaccgcctgtaaccggtgaaagtgactttctatggcaaaagcgtttttgaaaaggtgaggaagttaaatatcttaatgttgggaggttcttctggtttatctggctagaccctaatggaatcccaagtgtccttatggagcggggagcagagagagagatttgagtccagacgaggaagaaggtgatgtgagtctgggtgcgggacagggggagaatgatgctatgtggggatctgggctggggaatgacttagctgcatgagcggagtgacttagactcctgaactagaagaaatctagggctcatcacctcagcagccctaaccatcaaccttatttttattacaggtcttccatcgacggactccctaaaaagccagcggcgtggaggggcgccctctattggacaaatagatcttgactactttcggccctcaaatagcctgactaggcaaataacaaataataataatttttttttaaatcatggaaaatattttaaaaaacaattaaaaagttataaatctataaaatctgcttctgtctgtgtgtctgtatatttagatgtctcatgtgtacataatgtttcactaccaaaatatatgatgaaaccctcattaatcggcttagaaaactaaacacctaaatattttctcagaaaatacaaaaactttaactcaaatcccttttaattcacctgactttaaaaatctttaaaaaataaagcatgctttaaaattattagtaaagtaaaattagaacatcttcagaatttagacatttggtttaaattatacaggtcaaatactgcccttagtaaatattttcaggtcataaacaactcctgtaatcttttaaataattgaattacatgtctgttttagagctttaagttctagctaaagcctggggacaaatgaagggcaccatgccccctctctgtgctggaaagagacattttctacagctctgacccttgcagtaggctttgcaactgctacctatcaaaattgcctacatcctaagtttattattaaaaggagttgcttggagttaacattataatgaatatatgtaactaaaactatttctcatacaaagtatatgaaaaagtagaatgtatttttaataaaaagttataaaaagacatgaacatgtagtttttataaaaaacagtaattttgtctagttttgcagttctaaaaagttatgttaaattcaaaaataaaaaataacaagacaagactcaaggtttaaataagttgtaaaagatttgtaaaaattagttctataaaaattttacaaaaaaaagcattggttaaaatttaaggaattattttgtttttacagaaattaaacattcattaaaaacactctgatacaaggccttaatttgggttcatgtatcagaatagcagggttttcttagaatattaatctattctttaaaagaactatgaatgttatgcaaactttataaaaatcttaccttagagtcaaactgattaaaattccatagattttacgtaaaattttattaaaaattaacttcaacaaaaataaaatttgattttctcctttaaacaaaagttttgcgtaatattaaataataaagcatttttgtttaccttttaaactataaacacacacacacatacacatacaccaacactaaagtcagctgacctcatactgtctttattggatattcttgtttaaaaaactatcttctttggaaaataaagttttttattttaaaccatattttaaattatcattttgactaaatccataacatacagtgatctgtaataattctattttataatatcaagtgttttgaagaactccaggaacagccatgagagaacactgtggtttagtaacactttatttcctcagtttgaaaatagttgtctttcttggggaggccggtttcagcagatgaaaacaagagtcatgatgaaaattacccagcagtggttagtgtgaccataggaacattgtcatcaggtcagcagaaaacatatcagcaaatttttctcatactggcagtgtgtaggggtggatgtttacagttcctgaagccccagtggtcgtgtggtcttttagttttgccatttataggcaacttgtggtaactagctcaattagacacattccttatcacaaggacagagggctttctgtatcctagggttcttgccttggcattccagaagaatcaggtcacacgtggacgtggagaatgagtgcaaggttttattgagtggaagtagctctcagcagatgggggagccagaaaggagattggtttctccctggattggggccgttcagcagccctggctctcctctgactgccccaggcaaaatccacatcgttctataagtcggtgccctgctggtgtgctggtgcctgttgtcatgttcctcttcatgtccagccgcctgtgtgttcctccgctgatgtgctcctctcgacgtcaagcctcctgtgtgtctgactgctagggtcttggggtttttataagcacaggatgggtcttagcaggccaggatgatcttgggaaagacaacattcggtcaggaaaacaaaaatgcctgttgtcatctaggtccgtggggacaagcccaggtgtggagcttttagccagggaccacagcctcctgtatccaacacttcccttcaccttttctatatcattcaaagggatcatgcccttcccatcccagcacttcactttcatgtcatttgccccctctgaagaggtacatctaactgccattagaatatggatgatgaccagtcttagctgcttcctgctgaaagggggcattgttttgggggaaaacggcagtcagattcctcccaggggtctctataataaaagatcgaggtggctactttcaggaggtcctctaatgtactatctggtcccaagtcccatttctgcaacctcctcctgatgtcaggagctgcctgagtaataattttatcctttaggattatctgtccctcgattgaattaggagatagagaggtgtgatttaccaaggcctctcttagcctctccaggaaggcagtgggattttcatcaaatccctggttaattatggacaacttagtataattgagaggcttggtcttagacctacgtaagccctctattatgcacacctgaaagtgtctcctcttccagtcttccatctcattattgggatcccatttagggtccttcactggtgctacttctcttccagttggataatattcgctcccttccctgatgctataggtgatgcaaagctcatccccaaatctctctgctgctggcagagcagcctgcttctcagtgtctatcaggttctgactcaaaagtaacataacgtctctccaggagagttcaaatgttagggtgaaattctggaaagcttctatatatctatcagggtcatctgaacacttgcccagatctcccttaatttgctttaagtcttgtagggaaaagaggacttggaccttactgggcccaaattcactgggcatctgtaggaggggcaagagtgagactgggcttgtttgggatgaagatttctaggaggggccaggtgagaggctgaagctggatacggaggttggggtggacccagaggagcagggcttgagggagctggcacgtcagctgggggtgcgtctgggactcgtgtctttaattccctgggcttgaccctggcagccttccccgagacagcaaacaggagggctggaacaatcctacatgtcagcaaaggtctggattgctttgcaaggtatagaaagcctgcacatttggggcctcagaccatgtgtcctcacatccagagaaaagttctaattgcaggatggtattgaaatgaatggtcccttcctgaagccaagccagtccttcctgtaaaccataatttggccaaacctatgtgcggagggctatgagatgcttttcctctggattctgagggtcaaaacagtcccaatggttcaggatacactcaaggggagtacaagctgggggtggtgaggagaactggctgcccattctgaaagacagggaatagaggtgttcctcatttcccttccttcttttggcaaaaagctcagggtgtgatggggagggaaagcaagcatcttcacttcactttccacctcttacccctgcgccctggcaaccttggcaggtgccggccacaggtacaaatgcggtatgtacccatgaagcagggagaacctggagattaggaattaactgccctcacctatgtttccttttctccctgctgttgaaaaactttgagttccctgggcctttttatcccatgaggcatggcctccttctgtgggatggggttcagtcagcaggaattggtcctgtccatttacattgtgcctgttgcctggctttgaattcctcagacctgctttctctttctagggcctcagcctgaagcttggaattgagtttgggactgaaaaagcatttcagaggctgtttatatccatttagtgcctcaaataagccctgctgaatttgcaattatcagccagcaggggtcactcctctgttaacttccctattagaaacagagcggtggggattctcacttagaaaagaaaaaaagagaaaaacagttaaagaggcaaaaagtggggaatgctgggggaagaaccccttgcttagtgcaagtgggcccctctaatccttataactttcccatccttcccccagttcagaccaggttgaattccttggccatggaaggaaaggttccattgatgcagtgggtgagaagcactctgtagggtcctggctaccatcggttttctcacacccccctcatcccaggcagtggagggagacacttctgcgacattgctccccctgccccttcatggctattgggtgtggcctttgcctgctgcaggcatgcctaggtgctggagctgggagggaaaagggtaaggagaggtgccctggaagccgctcatgcctggggctgtcaaggtggaggcatacatggcacctctaggaaaaattggtctgatttgcacctttggcggctgagccaaatgctcattttacttagtaacattgcctcagcctgtagcaaaactcttaacattataaaggaagagataagatccatttcaaataatgtgtgagagagaaaagagatgaaaggaaaacagagtcttttacctgcaggaaagggagagaagtggcagagttttggaagaaaggcaggcccaacagtttcccattcactcacactcaccttccgagatcccagacgagccaccagttgaaatgggaaaagtttccttgtccccctcacaggaggtggagtgggggtgtggcttgcttctttagtactccgctgctcaaacctctagggaagcatacagactggcaagttgtggggctacaaccccatggcagcatctaggggtagatgtttacagctgctgaagccccagtggacatgtggtaccatgtgctcttttagttttgccatctataggtggctttgtggtaaccagctcaattagacccattccttaacccaaagacagagggctttctgtatcccgcggttgttacctaggtgtaccagaaaaatcaaatcacacgtggtcttggagaatgagtgcaaggttttattgagtggaagtagctctcagcagatgggggagccaaaagggagaatagttttcccctgaagtcgggttattcagcggcccaggctctcctctggctgccccagccaaactctatgtcaatccattggtcggtggcctgccagagtgctggtgcctgttggtggattcctctcagcgtcgagagtttttccctctcaggaaagggagagaagtggcagccacccatgtgttcttgcactgatgtgctcctctcgacgtccaacctcctgtgtgtctgcctgctagggtcccagagtttttttaggcacaggatagggcatggtgggccagggtgatcttgggaaatgcaacatttggtcaggaaaacaaaaatgcctgtcctcatctaggtccaggggcacaagcccaggtttggagccctagccagggaccccggcctcctctacccatcactttccttcaccttttctgtatcattcaaagggaccatgcccttcccttcccagcacttctcttctgtatcaataggtgatgtttttaaaatttcccaactctagtgcaggcatggtactagacatatacatagaaataaaaccacacttattcttctggctggcaagacatagtatttttgccaaattatgtgttgttttgaagcattttatgtacccctggtcatataaaaataaagctattttgttcagtacaaacagcagcattttctggattagaaagttaatcatcttaaaagatcatcacggatttttccattgcactcatcactaattgctttggcaaaaaatttcttatctcacgcatgacaaaatcagccgcagtatctcctagtaatttaatggtgatgatctttataaaggaaataagcacatcaagggaaaacataattttttttaaaaaaagagtaataaaactttttaaaagtcttttttaaaagactgcttttctaaaatagtaaaataaaactccaccaataaaaccaccaacaaaacagaaaagaaaaaataatgatatgatcggagctatttgatgaaagatggtaaattaaatttaaaatgattagaagagaaaaagcaatacctgtctcccgtaggtctcagtccaggttctgctatgcctttctcctggtgagccacctatttaagagtcgcttaaagcatatgttaatccaacaacagcagattaaaaaccaatgcaatctgaactatttgatctaaaaacataaataaaatttaaaacaaataaaagagaaaaagcagtacctgtgtcctgtaggtctcagtccaagatctgctctgactcccttgtggtgagttagccctttagaagtcacttggggtggggcatatgttaattccactaacattggttctggccaatgagtcaggaaggtggtaaatggcaccttttcttcttgctgatttctttcagttcctttggagtctggacattagtcctttgtcagatgcctagtttgtgactactgtttcctatactgtgggttgtgtgtttaccctgctgatatttcttctgccttgcagaagattttcggtttcattaggtcctattgatcttattctatttttatatttttgcgtttgcttttggggcattagtcatgactacttggcctaagccaatgtctagaaaagctttttggatgctatcttgtagcatttttagactttcaggtcttagatggaagtttttatatgctttgttaaagatcaggtgactgaaagtaccgggctttgtttctcggttctctattctgttccattgctctatgtgcctatttttatacttcctgcaccatttattgaataaagtgtcctttccccaattagtgtttttgcatactttgttgaagattagttgtctgtaagcatttggctttatttctgggttctctattctgttccattgctctatgtgcctatttttatacttcctgcaccatttattgaataaagtatcctttccccaattaatgtttttgtgtactttgttgaagattagttgtctgtaagcatttggctttatttctgggttctctattctgttctattgctctatgtgcatattttataccagtatcatgctattttggtgattgtagccttgtagtataatttaaagcctgccttcagatttgttctttttgcaaagtattgctttggatatgcggtcacgtttttggttttgtataaattttaggattcttttttctagttctgggaaggagaatgatgatattttgatgagaattctactgctctgtagatggctttggagagtatggtcactttcacaatattgattctacctattcataagcttataatgtgttcccatttgtttgtgtcaactgtgatttctttcagcactattttgtagttttccttgtaggaaacttacattaacctacttggttaagtatatttctaagtattttacttattaaaaattctcagggaaatgcaaagtaaaactgaggtgggaaattaaagaaaaataaaattaaaaagaaagggaaataagctttcttgtattaagctaacttgtcccagaggcagcaacaggcacagcccagacccaggaaaagtcttgataatattatttattgtattctggagactcttccagcactccttcaatgtagggagaagaaaaacaaattttcctttgttttatggtatgagtttatagattcttgttctctttaactagtaacttcaagtattctgttttatctaagaagtatggcaaaggtcatgagaagcctgagcaggcctgaactacagctctctaggcaccatagtgaagataaaccaatgcaagcctctttagagcaaaacctagataatagacatctgggttgcatagcaacagttatgtgcaatcctgagttatgaacctgttacaatttgattaactgtctttttcctgcctctgtatccctgctttcacaccactgtaagcttgcttcaagctggcccacccccttttgtgaagtgtgtataaaagtcaagtgctgtctttgttccaggccctgtctttggacgtgagtctgctgggcctgagagcactcaataaaagattctcctgttttaacccaaagcctctctctcatcctcctaaatcccacaacaaaaccacaatgagatgctatcttaatcttgctagaagcccataatttaaaagtcagaaaacaatagatgttggcatagatgtggtcaaaagggagcactttgacactgctagtgggaatttaaactagtccgaccactatggtaaacagtatggggattccttaaagaactaaaagtagaccattcattccagcaatcccattactggctatctacccaaaggaaaagaagttattccataaaaaagacacaagaatatggatgtttatagcagccgattcgcaattgcagtgatatgggaccaacttaagtgcccatcaacgaacgagtggataaagcaaatgtggtacaccatggaataatacttgataataaaaaggaacaaaataatgtcctttgcaacaagttggatggaactggaagccattattctaagtgaagtaactgaggaatggcaaatcaaatattgaatgttttcacttttaaatgagagttaagctatgagaatgcaaaggcataagaatgatataatggacttggggactcagggggaaaggttgggagggggatgaggaataaatgatgacatattgggtatattatacactgctcaggagacagatgcctcaaaatctcagaaattaccactaaggaacttttatccacataaccaaaaaccacatatattccacacactattgaaagaaacataaacattattttaaaaaataaagccacttttaaaattagcaaaataaaataaatatgtcttcagagtttagatattggatccaaattagacagatcaaatactgcctttactaaatattttcatgtcattaacaacttctaaaacctttcaaacagttttttgacatgtcttggaaccatccatttctagctaaggcctgggcacctgtgaaatagggccatgcccccccttatactgggaagagtaagatatttcaagactaagatgttttctacagctccatctttttctttaagctctacatcaaggacataattaaaattggttgtctcctaagtggtttactaaaaatgcatacttaagagttaccattataattaatatttgtatctaaagctacttaaaaattttcacacacaaatctgactgaacaagtaaaatatattttaagtcaaagtttataaaaggacatgagaacatagcttttatgaaaaaattagttttgtcaagtttagaggttttcaaatattttaaattcaggaaataaaataacaaaaagacaaaagaaaatggttgaacaacttagaaaaggtttgttaaaattcatcttataaaacaatctacatgtaaaaagtgggctaaaatttgaaagagattatttaggttttccataaattaatccagaaggggtaggaagtcttaagaatgaggaaggacaggaggaaggggaggtcatcctgacactgcagaggcagaagtgcagctgaaggtatgaaggctaagaggggaggggagtttgagtgctgctgcctggctgtcagagcagaggagggtcctgggcaccagacttgaggaagggatgaaaatgctgggcagacctgtagtgggcccttgagatggcagatagtggtttccagagagagggccattgttttccagtgcccagcactgagcagagagagttttgggcagtgtaaaaaaaaaaagagaacttacctctttctcgttttagaaaaagaacagtctaagaatatcagcagggaaactctcagtgcttcaaggggttaaacgcccttttggctttcttgtgttggtttcatcatagaggaggagaaacttcttggaagtgttcctaaaaacacaacacgtctgcttctcctttcaaaaaaggaagtgctaaaacacgaacactctagatccaaatattaatacggatgtctaaatgcttccgttttccaaggggcagaaagctaaaggttgtaacctattcatttcagtcaaagttggtgaaagggaagcaaaggaactgggtggggcttggaaggatgacgaagctcaagctcattggccagcaacctctctcctgggggcgggaggggtgagcatacgtcattgctttggcttctataaaatgaggaggactcaccgagtgtgaagagtccttctggtgattgcagctgagagcacactcacgacgttctgcaaggattctctgattatgattctgaagggaaaagcgatggaatggacagcagagattgtaattttctttatcttgaattacggaagaaagtatctaggacagaaatccacgacaagtccttggaaccagcagatctcttcgttcacggagacgttgacgtattctctattgaagaagattcttaccttcttactggacaaggttttgtcagttctgcgtgactggattgtccgggagactctgaggaaactgatgtcacatgtttttccaaagaagatgtttctggaaccaacaactgtgattgtggtttgaggacttctgagagttccagtacaggaaataagcagaacatcagctggaggctaaacggatccagacttcactcttcacttcccttcctattcagtctattgtgcctgctgactgagaagcttggctggtatgtgagcaaataaacggaactattcagaaggagatgttgacatattctgtattgaagaagatccttatcttctcacctgacaaggttttgtcagttctgtgtgactggattgtccggaagactctgaggaaactgatgtcacatgtttttccaaagaagatgtttctggaaccaacaactgtgattgtggtttgaggacgcctgggagttccggtatgcgaaataagcagaacatcagctggcggctgaagggatgcagcctccactcttcacttcccttgccattccatctattgtgtctgcctgactgagaagcttggctggtatgtgaggaaataaacggaattataaacaaggagattgtttctcatctacttcattctgttgtggcttttctattttggggttcagggtgtgtgacaaggaccaaggagatgaaaggtttcatgatggagaaagcccaggcaatcagattgaagagctatccacagggaatcttggctgctgaggggctgcaccctgcaacggactgaccatatgacagaaaagggttttaaaggctcaacttctggactgagaacccagagtaatttgggaacctcctctgtgaggagatatgaaagctgggaatcatgacatccctaggaatggaaggcacatttcctgatggaaggggtgctttggaaaacaggagcagagtagacacagcagccttgtggatacgggtgggcagcatgcatgggtgatgtgaacgtggagtgtttgtgatcgaaactcaaaatgtctgacaaagtgaaaacctagaaaccacaatgaggaggaagagtttgtgagggcaatcactctccccatgtgtgaaaatcgggggctcttaaaatctcatctggagaggtgcagtctaccaaactctgggactttagcctccccttttaaaaaaccgtgcatcaataccaacgtccgaaaccacagaaataacacctggcttgcatggagacaaggacaaaaagccgtcatgatgagttgttctgctcacttgctgcctctgttcagtgcacaggatattgtccacccactagcaggctactgcaagagaagtgtgcaatatgttccctatgtgccatatatgtgccatatggcccatatgacaactgagtcagaaaatatctgatgccctcagagttacactccacctggagcttgcccccagccatccaggacctaggctccctaccctgtccaattttctggtgttttgggggcttcattctctaaggtgtgcccactctttactcaaaccaaaacacccacatattcctgcccatgaacaaccaatcaaccacttctcagttccacatcctgctgttgggtctctagtggtgacactgtaactcccaggtcatagtggtgacactataacacctagctaaattgatgccttgtctctaggaggccatgggctcctgcaggtctcatctgactctctgtagccttccctgacaatgctcacaatacccaagccagagccacattgacagcaagctgctctcatcttacctttgccagacctggccactggaaaaggctgaccctcatcctgcaatgcctatacctccaacctttgtctcaagctggtgtcctggagggacttctaagcagaaaacagattcagactcccatcctctcctgaatggcctcatatccaattctcagaccctcagccttcattgtaaggacacttcatccatgcccttgagtattctgtctgcactgtgtattctgcaatagattctcctccctctgcgaccctcaactccttccgcagactttttgttttcttgatcatctaccatagtcttccactgggacactgccaagcccattctggagagtgagttgtgcaagtacactgccccccatctacctttcgggaggtgtatacacccttctttctcccaggtctggaggctttctattttcatcctgaggcatctccacctgctcttggattcttcaaattgacaaccaccagttaacaagaactatgtgtcaccaaatagccaaacaatggcaattacaaaaataaaattaatagctgtaacccccattagcaaggatacacaaatcaaatcagggatagtgggtgaggaagtctgcctaacattcaaggaaggattctgaagtgatacaaaatcattgcctttgctatctttagaatggacactttcagccaggcacagttgctcagcctgtaatcccagcactctgagagccccagttgggtggatcacttgaggccagcagcttgagaccaccctgggcaatgtgcagaaaccccaactctactaaaaatacaaaaatagccagttattgtggcacatgcctgtaatcccaactccttgggaggctgaggcacaagaatcacttgaatctgggagccagagtttgtaatgagcgaagatcatgccactgcactctagcctaggcattagagtgataatctgtctgtggaaaataaaaacattcctcttcaaagttttcttctttaaatcataaatgttggaattaatatatcctctttgaaactcactttcttcaagcttctttatttgatggtagtaaatctttgttaagctttatgaggcaagagtaatggaagaagcatattatatatatttatactctaacctcagtgcttgttctagcaagctcaggcatgcgtgaatgtgcccaggcatgttccagcccataccttatatcctttccttattgggaaatgctgttactcctataagcattcttgtaagcaacttcctctttttctttgtctccactatctttacctattgaggacagttttaggttcttagccagttggatgtagcatagactgtgaggtccaaccccagccaatggagatagcacacagcagtagcgacctcatgcttaacagataaatattcctgtctccctttgtttggggtgctctcagctgatgagcaacaccctttctaaagaaattaaagttgtcttgctgagaaaacttttggtctaaatgctgattcttccttgcagcactgaagaagaagcaattatttccaacactttctcatacacaaaaaaagaagaaggtggaagaaaactttcttgtgcaccctatccctcactcagaaagacaacagaaggctcctagtggcaagccctagaggattcatttcttttgggaaccctcttggctgggatactaggactcaggtcaaactcagcattttcagtgtgtgggaagtgtgcttgggtttcactgttacttccaataatgtgatttggtccttggggttcaccaaattttggtatggagtggtgaaccctgttaagtttaagtgtctataaaattaacaaagcaaaataaccattctgccccatggttcagagaccaaatattgtgtaggaaatgctttagcgagagaaacagagaagaataaaaaatgtcctcaagcgctgcattatttcttgttatcgtccagatcttagaggaaaggctttcattttccctcattcagtatgatattagctgtgcatctgtcatttatggcttttattatgttggggtatgttccctgtgtatgtagttttttcagggtttttgttatgaagtgatgttgaactttatcaaacgtttttcagtttcagttgaaacgatcatatgctttttgtccttcattctcttgatatgatgcatcatgttgatgatttccatatggtgcactgtccttgcatcctgggcatgaattccacttgatcatgacaaatgaatttttaatgcattcttgaattccgtttgctggtattttgttgaggatttttgcatcaatattcatcagagatattggcctgcagtttctttttttttcttttttctttgttttgttgtttgtttgtttgtttgttttgatgtgtctatgtctggttttggtatctgggtagtagtgttccatccccttttattttttagaataatttgaataagactggtgttggttctttaaatatttggtagaattccgaagtgaagtcattgggccccgggcttttctttagtggaaggctgtttattatggcttcaatctcgttacttattattggtctattcatgttttgaatttgttccttatttaatcttggtaggctgtgtgtatctaggaatttgtccatttcttttagattttcaaatttattggcacataattgcccattgtagcctctaatcgtcatttgagttcctgcagtaccaattataatgtctccttcttcatttttgattgtatttatttggatcctgcccctttttttcttacttaggctgcctaataatttcttaattttgttgaactttttcttttgtttgtctcgctctgccaccaggctggagtgtagtggtgtgatcttggctcactggaacctccgtctcccaggttcaagcaattctcctgcctcaccctcccaaatagctgggactacaggcaagtgccaccactcccagctaatttttgtatttttagtagacacgggttttcaccatgttggccaggatggtctcgatctcttgacttcataatccacctgcctcagcctcccaaagtgctgggattacaggcatgagccactgcgcccagcctaattttgtttaaattttcaagaaatcaacttcttctttcattgatttctgtattttttatttccattttatttatttaaactctaagctttattctatcttcttctcattttagctttggtatgcttattgcctctctagctctttaatgtgcattgttagattgtttatttgaagttcttcctctctacaccataagacgtaagcatgtcctcattatgtcataagatgtaaccacttacagctataaacttccttcttagttctgcttttgctgtatctcataggctttgttatgttgtgtttccattatcaattgtgtcagaaatttttcaatatttttcttaatttcttcattgagcaactgatcatttgggagcatatttttaaacttccatgtacttacatagtttccaaaatacctcttgtgatcaatttctagttttattccactatggttcaagaagatgcttgatattatttcaattttttttcacattttaagatgtgttttgtgacctaacatatggtctactttttttttttattaaactttaagttgtggggtacatgtgtagaccgtgcagttttgttacataggtatacacgtgccatggtggtttgctgctcccattaacctgtcatctacattaggtacttctcataatgctatccctcccctaacctccaccctctgacaggacctggtgtgtgatgttcccctccctgtgtccatgtgatctatttttgagaatgatccatgtggattagaatgctgtggaaaagactttggattcctaatatccagggagggagacgatgatattactttcaatatcacacgggtgtacacactctctgtgacattgttcctaatatccagtggaagagaggatgatataacacccagggagggagaggatgatattactcttaatattgcagggtgtgtacccatgcctatgatattgttcctaatatcaggagggggagaggatgatattactcagaatatggcagggggtgtacacacactctgtgacatggttcttaatatacaggggagaatgggacaatattactctcaatatcgcagggggcgtacaaccctgtgatttgttcctaatatacaaaaggggacagtatgatattgttcctaaaatcgcagaaggtgtacaacgccctgtgatattgttcctaatatccagggcgggagaggatgatattacccccaatatcacagggggtgtgcactttccctgttacattgttcctatgatccgagtggggggaaatgacattagtcccaatatcgcaggatgtgtacactactcccccatgatattgttcctaatatcaagggggagagaggaggatattactcccaatatcgcaagggaggtacatcctccatgcaatattgttcgtaatattcaggaggagagaggaagatattactctcaatatcgcagaaagtggacacccaccctgtgatgttcttcataatatccagggaagcagacgattatatgactttcaatatcgctgggagtgtacatcccttttgggatattgtttctaatatccaggaagggagaggattatattacttccagtattgcagccagtgtacacatttcttgtgatattgttcctaatatccagaaagggaaaggatgatattactcccaatattgcaggtggtgtacacccccctctgatattgttccttacatcaaggaaaagaaagaagaatattactcccaatatcgaagagagtgtacacccctcctgtgatattgtatttaatatccatggggaaagaggatgttgttactcccaatatcgcagggggtttacacccacactgtgatattgttcctaaaatccagtgaaggagaaaataatattgctcccaatattgcagggtgtatacaggccctcccccgttatattgctcctaatatccagcggtggagaggatattactttcaatttttgcagggagtgtgtaccccctctctgatatttttctaatatcaaggatgggaaaggatgccattactcccaatatcgcaggaggtgtacatgccctgtgatattgttcctaatatccagggaggtagaggatgatattactttcaatattgcaggggctgtacaccctctatgatgttgttattaatatttaggttgggagaaaatgatatttttcctaatatcctgggaaggaaaggatgatattactgtaaatattccagggagtgtacaccttcctaatattctaatattgttcctaatatccaggggtgggagaggattatattactcccaatatcgcagtgggtgtacacccctcctgtgatgttgtttctaatatccaagcgaggagaaaatgatatcactctcaataccgcagggggtgtacaccttccccatcatatcgttcctaatattcagagggaaagaagatgatgttactttcaatatcgcaggggttgtacacaacccctgtgatatttctcctaatatccaggaagaaagaggatgatattgctcccattatagcagacggtatacgcctccctgtaacattgtttctaatatcaagactgggagaggatgatatcacttccagtatcgcaaggggtgtacacctcccccgtgatattgttactaatatccagggggaagaggataatattactttcaatattgcaggggctgtacacccccgtgatattgttgttaatatttaggttgggagaaaatgatattagtccaaatatcgcagagagtgtacacacttccgataatattgttcttaatatccatgggggagacgatgatattacacccaatatcgcagggggtgtagtctccccttgtgatattgtccctaatattcagggaagtaaacgatgatgttagtgtgaatattccagggagtgtacaccccctttgtgatattgtcctaatatccgcaggagagaagataatattactcccaatatcgcagggggtgaacacaccccctgtgatattgtttctaatatccaagcgaggagaaaataatattactcccaatgtctcaggggatatacaccttccctatgatattgtttctaatattcaggtggaaaacgggtgatattactcctaatatccaggaagaaaggggattatgttactccccttatagcagggggtatacacctcccctgtaatattgttcctaatatcaaggctgggatatacgtggggggaaggatgatattactcccaatatcacaggggttataaaaccttctgtgatattgctcctaataaccatggcggaagaagatgatattactcctaatattgcaggaggtgtacactcccccattatgttgttcctagtatgcagaaaaggagaggatgacattattgccaatatcgcagggtgtgtacaccacccatgatattgttcctaatatttagagggacagaggatgatattactcccaatatcgcagggggtgtacacgcatcccctgtgatattgttcttgaaatcgaggggaaagagaattatatttctctaaatattgcagagggtgtacaccgccccctgtgatattgttcctaatagccgggggcggggggagataattaaattactttcaatatctcagagagtgtacatcccccttgtgacattgttcctaatatccagagcaaaagagaatgatattcctcccagtatcgcaggaagtgtacatttaacctgtaatattgtttctaatatccagggggaagagaatagtaatactcccaatatcgtaggggttgtacaccttttctgtgatattgttgcaaatatttagaagagagagagaatattactcgcaatatcacagggaatgtatacttcccctgtgatattgttctaatatctagaaaaagagaggataatattactcctaatattgcagggggtgtacacccccacttgtgatattgttcctaatataaaggaaggtcgaaaaacaaacggggagcccagggggaaggaaggcaggcgaggaagaggcagcgccggggcgccggagggagcagccgggccgcggaagcgcgagcacgagaccggtcgcggtcgcagtcgcatttttgccgttgtcgcggccgccgccgccgaggcttacccggggatgtctgagcccgcgcctcgcggcccccaagctccacgctgcgcccgctgtcccggcctctaagggccgccacgtccctgcggcgcgcgcaggcagaaagcggcttcgtgccggcggagggggcccgggcgggccgggaaaggctgccccaggccccgcgcctaccccatcaccgcggccggcgccgggccgggaggatgagcggtgtggggctctgaagcatggagggggttttgtacaagtggaccaactatctcacaggttggcagcctcgttggtttgttttagataatggaatcttatcctattatgattcacaagatgatgtttgcaaagggagcaaaggaagcataaagatggcagtttgtgaaattaaaggtgacagctttggaggggaccacccttgattggatacataaattctgttcattcagcagacaacacaagaatggaattaatcattcctggagagcagcatttctacatgaaggcagtgaacgcagctgaaagacagaggtggctggtcgctctggggagctccaaagcatgtttgactgatacaaggactaaaaacgaaaaagaaagaagtgaaaccagtgaatcgctgaaaaccaaaatgtctgaacttcgcctctactgtgacctcttaatgcagcaagttcatacgatacaggaatttgttcaccacgatgagaatcattcatctcctagtgcagagaacatcaatgaagcctcttctctgcttagtgccacgtgtaacacgttcatcacaacgcttgaggaatgtgtgaagatagccaatgccaggtttaaacctgagatgtttcaacggcaccatccggatcccttagtttctcctgtgtcaccttctcctgttcaaatgaggaagcgttctgtcagccaccctggttcttgcaccagggaggagtagccactgtataaaagaaccagtatctgcacttcaccgactctcccagcgacgccgaagaacctactcagatacagattcttgtagtgatattcctcttgaagacccagatagacctgttcactgttcaaaaaatacacttaatggagatttggcatcagcaaccattcctgaagaaagcagacttatggccaaaaaacaatctgaatcagaagatactcttccatccttctcttcctgaagaaactgtagtgtccaactttctctaagtattgctatgcaaaagctgctgtaattgaactattgttatagggagtagttttttcccttaggactctgcactttatagaatattgtaaaacagacaaacaagaaaacaaaccacatacttttgaagcgtgttttatctttatatagtttgtttgcaagagtattttcctaataacttcacagtatgaatgtgcatcttttttttctttttttaacaaatgatggtgtaacattttgacatccataaggacaaatgtagatatttttctaaaaaaccgtgaggggactgacagcttggtcagggtgtattgtagcttataaacatgaaatcttacaaggtttcagtttgacagaagtgtgatatatgtaacttgtgccatggaccaaatggtcactttaccacagctaaaaatgagttatgatagcagcttgatggtgattgcattgtattcctttaatcaaaaaggaaacgcaatattctaagtatctttagcccaaataccatgacatattgagcatctttaaataaccagactgtattgtccttcatatgtgaagttgacactactgatttgtcaataccaaattttgggttaaagtgtttaatttttatttatttattttcttgttgcctcaaaagatgattgcattctaacttttgtgacctaccaaatttaagatgtgtatacattgttctttacgttgttctagaaaagagattttaatgctgtagtgacttagctcacttacatcagagaaataaacaactttcaatggaaaaaaatatatataaaggaaggaagaggatgatattacttctcatatagaaggggttgtacaccccccttgtgatattgttcctaatattcagggagggagaggattatattactcccaatatagcagggagtgtacacccccccccccgtgataatgttcctaatattcagggaagcagaggatgatattactttcaatatcacagggggtgtgctgtccccctgttatattgttcttaatattcaggggggagaggatattattatgcccgatatcacaggagaagtacaccccacaagtgatattgttcctaatatccaggggtaaagaggatgatatcgcaggtggtgtacacccctccccgtgatattgtttctaatataaagaaggagagagcatgatattactcccaatatcgctggaggtctacaccccccttgtgatactgttcctaatatccaggaagggaaacaatgatattgctgtgaatattccagggggtgtacacccctttgtaatattgttcctcatatccagggggtagagaggatgatattactcccaatatcgcagggggtgcacggccccactgtgatattgtttttcatatccaggaggggagaggatgacattactctcaatatggcagggggcgaacaccccctgtgatattgtgctagttaggttgggagaaaatgatattactcccaatatcgcagggggtgtacaccgctcctgtgatattgttcctaatatccatgacgggagaggatattactcccaatatcgcagggggtgtacctctcccctgtgggattgttcacagtatccaaaagggaagaggatgatgttactcccaatatcacagggagtgtacaccaccattgtgatattgttcctaatagccagggaagaaaacgatgatattattgtgaatattacagggggtgtacacaccccctgtgatatggtttttaatatacaggttggaaaaggatgatattactcccaatatcacaaaaggtgtacacacccccccatgatattgttcttaatacttcggtggggagaaaatgatattagtctccatatcacaggggtgtgaactcctccggtgatattgtttttaatatcaagaggggaggagatgatattgctttcaatatcgctgggggtgtacatccctcctgtgatattgttccttatatccaggcgaggggaaaataatattactcccaatagtacacaccccatgtggtattgttcctaatactcagggggaaagaagataatattactttcaatatcacagggtttgtacacctttcctgtggtatagttttcaatatccagggggaaggtacatgatattactcccattgcagcaaggggtgtacacacctcctgtgatattgttcctaatatccagaagtggtgaggatgatattactcccagggggtgtacaccccacctatgatattgtttctaatatccaggggaaaagagtgtgatattatgcccaatatcgcagagggtgtacacttatcctgggatattgtttctagtatttggggagggaggagaggatgctattattctcaatatcgcagaaattgtacacccccgctgtgatattcttcataataatcagggaaaaagaggatgatattactaccaatattgcagggggttacacttcccctttggtagtgttcctaatatccaggaagaaagaggatgatattaatcccattttccaggaagtgtacacccaccgtgtcatgttgttcctaatatccagcagggaagaggatgatattactcccaatatcggagagggtgtacacttcccctgttatattgtttctaatacccagggggaagaaggatgacattactgccaatatcacagggtgtgtaccccaccctgctattgttcctaatattcaaaaggaaagatgaaaatattactcccaatatctcagggtgtgtacacctctcctgtgatatcgttcctaatatccacaggaagagagaatattactctcaatattgcaggggggtgtacacccccctgtgatattgttccaaatattcgggcggggagaggatgatattagtcccaatatcgcagggggtgtgcaccaacctgtgatattgttcctaatatccatgcgggggaggacgatatcactctcaatgtcgcaggaagtgtacacctctcttgttatatttttcttaatatccaggagggaaaagatgatattactgccaatatcgcagggtgtgtccaccccccttttatattgttcctaatatccaatggaaaagaggatgacattgctctccatatcccagaaggtgtacaacgcccctgtaatattgttcctaatattttgggggaagagaggatgatataacttataatatcacaggaggtgtacaccacccctatgtattgttcctaatatcctttaagggagaggatgatattactcccaatatctcaggtggtgcctattccccctgtgatattgtttttaatatccaggggaagagagtatgatattacgcccaatatcgcagggggcatacaccctctctgagatattgttcataatatatagagggagagaggatgatattacttccaatatcagaggtggggtacaccccccggttatattattcttgatatccaggaggggagaggttgatattactggatatatagcagggagtgttcacatcttctgtgatactgttcctaatatccagaaaagtagaggatgatattactcccaatatcgcagaacgtgtacacctccctgtgatattgatcctaacattcaaaggggagaggatgatattactcaaaacatcacagggcatgtacactcccctgtgatattgttcctagtatccagaagggagcaagataatattactttcaatatcgcagggggtgtacacccctctttggtatgtttcctaatatccagaaggaaagagggtgctattactttccatattgcaaggggtgtacacccccctgtggtatggttcataatatccagggagggaaagggtgctattattccccatatcgcgaggcatgtacaccctgctgcggtacggttcctaatatccagggggaaagaggatgctattacttcccatatcgcggggtgtgtacacccccgtgtggtatgttttgtaatctccgggaacgaagagggtgttattacccctcatatcgctggaaatgtacactcccctgtggtacggttcacaatatccaggggattgagggtgctattactccccatatcgcggggggagtgcacctccctgtggtatggttcgaaatatccagggtaagagagggtgctattattccccattttgcaggaggcgtacacccctctatggtatgttttgtaatatcccaggtaaggggtgctattgagagaagagagcaaaagaccccccccatattgttctgtattattttatactcagtacctgttttaagaagaaacaaggaagcgaaaccaaaggcaggcagcccggcgccaggcaccagatccaaaaccagacccgaaaccaggcctgggccttcctgaccttagcctgaaagttaaaattcaacccatgacctagcaactgatgttatccatagattccagacattgtatggaaggacattgtgaaatttcttgttctgttctgtttcactctgagtactggtgcatgcagcccttgtcacatacccactagattgctcaatcaatcatggccctttcatgtaaaaaccttagtgttgtgagcccttaaaaaggacagaaattgtgcactcaacaagcttggattttgatactctagtctgctgatgcttccagctgattaaaagccacttccttcactacctcggtgtctgtgggattttgtccgcggctcctcctgctacactgtgactccccttatagagaggggtgtacacccccctttggttcctaatatccagcgggggagtaggtgctattactccccatattgcggggagtgtacacccccttgtagtacggatcgtaaaatcaaggagggagagaaggtgtaattatccccatatcacagggagtgtacacccctttgtggtatagtttgtaatatccacgacgggagagaatgctattactccccatatcgtggagggtgtacaccgccctgtagtatggttcgtaatatccggaaggggagaggttgctattactccccatatggtgggaagtgtacacccccatgtgatatggttcataatatccaggggggtagaggatgatattacccacaatatcatagaaggtgcacacccttttgtgatattgtccataaaatccagaaggggagaggatgatattacttccaatatcacagggggtgtgtagccccatatgatattgtttgtaatatcaaggtagggagaggatgctattccttacaatagctcaaggggtgtaaccttcttgtgatattgtttgtaatatccagaaggggagaagataatttttttattttaaaagtaaactttaatgtcaaaaatgcaaacttgagaagggcagaaagatcaaacagaaggctgccacttcacaattggagggttgcacagtggccgggcagaggcgctcctcactccccagacggtgaggcagccgggcagaggtgctcctcacttccgagatgttgcaggagccgggcagaggtgctcctcacttcccagaacagggggctgccgggcagaggtgctcctcactgcccagacggtttgcaggcctggcagaggcactcctcacttcccaaacggagcagcggcaagccagaggcgctccacacttcccagatggtggggcagccgggcagaggcgatcctcacttctcagagggtagggcggcccagcagaggcgctcctcacttcccacatggtggggcggcaggctagaggcgatcctcacttcccagacggtggtgtggccatgcagaggtgctcctcacttcccagatggtgtggccgccgagctgaggcactcctcacttccctgacagtggggcggctgggcagaggcgctcctcacttcccagacacttggactccgggcagagactctcctcatttcccagatggtggggctgccgggcagaggcgctcctcacttcccagacggttcagaggccgggcagaggcgctctggggagaggataatgttactcccaatatcgcagggggtgcacactccctgtgatattgttccgaatatccagagggggaaaggatgatatagctcccaaaatcgtggggagtgtacacccccctgtgatcttgtttgtaataccaagaagaaaagagaatgctattatttccaatatagcagggggagtacaaccccctgtgatattgttcgtaatatctagggggagagaaaattatattagtcttaatatctcaggggacgttcatccccctgtaatattgttggtaatattcagaatggagaagatgatattgttcttaaaatacaggaaaaaatatgataatattacttccaatatcgaagggggtgtacactctcctgtgatattgttcccaatatccagaatgaaagaggatgctattactcccaatatcccagggagtgtacacccctttgccatattgttcataatatccaggggaagacaggataacattactcccaatatcaccgggggtgtccacccactagtgatatttattgttcatcatatccagaaaaggagaggatgatattactcccaatattgcaggtggtgtacggtccctgtgatattctttgaaatatctagaaaaggagaggatgatatcactccgagtatcacagggggtgtacacccccctgtgatattgttcgtaatatccaggggagaaaaggatgatataattgccaatatttcaggggatgtgcacctccctgtgatattgtttgtaatatccaggggtggagaggatgatattactcaaaataacgtaaacatcctgtgtgtacatcccctgtgatattgtttataatatccaggggggtagaagatgacattacccccaatatcacagagtgtacacacccctgggatactgttcataatatccaggcgggaaagaatgaactacttccaatatcgcaggatatgtacacccccctgtgatatatttcctaatatttatgtgggtaaggatattacccccaatatcacagaaggtgtacatcctctttgtgatattattcctaacatccaggaaaggagagaatgatattactcccagtatcgcagggggtgtacaccacccctgtgatattgttgctaatatccagggggagaggataatattactcccaaaatcacaggggacgtacactcctcctgagatattgttcctaatattcatggggaaaagaatgctactactccaaatacagcagagggtgtacaccatccccgtgatattgttttttatatccaaagggtgaaaggctgatattactcccaatatcgcagggggtgtacaggccccccatgatatcattcttaatatccagggaggcaaagaatgatgttactcccaatattgcaggctgtatacaccccccgtgatattgttcctaatatccagagtaagagaggatgacattgctcccaatattgcaggggttgcacgcacgccctgtgataatattactcccaatatcaacagtgggtgtacactcctcctgtgatattgtttgttatatctaagaaagaagaggatgatattactgtcaatatcacagaaggtgtacagccccttgtgatgttgtttctaatatccagcggtgagaggatggtattactcgcaatattgtagggggtgtccaacggccctgtgatattgtttctcatattcaaaaaggaaaagaataatataactccaaatatcgcagggtgtgtacacttccctgtgatattgatcctaatatccaggaagagagaggatgatattaatcccaatatcacagggggtgtacatcgcttctgtgatattcttcctaatatccagggggggaggggatgctattactcttaaaatcgcagggaacttacactcccactatgatatttttcctaatatccaggaagggagaaaatgatattactcctaatatcacatatcacaatgggtgtacatctccccgtgatattgtttctaatatcaaggatgggagaaaattatattactctcaatatcgcagggggtgtgcacacctcctgtgatattgttcctagtatccagcggaggagatgatattactttaaatattgtagaaggtgtacaacccccctttgatattgttcctaatatccagggggaaaggagatgatattactcctaatatcgcaggggctgtacaaccctatgtgatattgtttcttctaatatccaggggtggagaagataatattactcctaaaatcgaaggggacatacactccccctgtgatatttttcctaatatccagaaggaaagaggatgatattactcctaatattacaagaaatgtatacctgtcctgtgatattgttcctaatatccagaggggtaaatgattatattactcccaatatcgcaggggtgtacaccttccctgagatattgtttctaatatgcagtggaggagaggatggtattactcccaacatcacaggagatgtaaactccccttgtgatattcttcctaatgttcaggacgaaggagggtaatattactcactgtattgcagcagggggtgtagagccccctgtgatattgtttttaatattcaaggttggagaaaataatattccttccaatatcgcatggggtgtacacccttctttttatatagtttctaatatctggggggagaggatgatattactcccaatatcgcagggggattacacccccactgtgatattgtttttaatatccagggtgggagaggataatattactccaaatatcccagggctatacaccctccgtgtgatattgtttctaatatccagaggaagagaagatgatattactcccaatgtcacagggtgtgtacaggccttctttgatattgttcttaatatccatgagggagaggatgatattactcccaatatcgcaaagactgtacaccctttctgtgatattgcttccaatatccagggagggagaggatattacactcaggatcacagggggtgtacaccccaacctgtgatattgtttctaatatctagggaaaatgagggtgatattactatcaatatcacaggaggtgtacactcccttatgatattgttcctaatatccaggagaatgacaggataatattactcccaatatcgcgggtggtgtctccccccactccgtgatattgttcctaatacccagagggggagagaatcatattactcccaatatcgcaggggatgtacacctacatccggcggagtagaagataatattactcacaatatcgcaagaagtgttcaccttccctgttatattgttgctaatatccagggagtgagaagatgatattactttcaatactgagcgtgtacactacccctgtgatattgtttctcatatccagtagaggagaaaatcatgttactcccaatattgcaggggtgaacacctcctttgtgatatttttcctaatatcaggaaagggagagtatgatattacccttaatattgacaggggtgtacacccccctttgatattgttccaatatccaggggggcagaggataatattattcccaatatcgcagagggtgtacaccccccgtgatattgttcctaatatccagagaaataaaaaatagtattatttccaatatcacagggcgtacattttccctgtaattttgttcctaatatctggggggtggggtggcaggataatattactctcaatattggagagggtgtacacccccctgtgatattgttcctaatattcagggtgggagagaatgatgttactcccaatatctcaggagtcgtatacacccccttgtgatattttttctaatatccaggaggcagaggatgatattgctcccaatatcgcagggggtatacacccgagctgtgatattgtttctaatatgcaatatgggggaaggatgattttactttcaatatcgcagggaatgtacactttccttgtgattttgttcctaatatccaggggtggagaagatgctattactatattactcctcatatcgcaggcggtgtacaactccctgtgatatggttcagaatatccagagtgaaaaaggagggtgacattactcccaatatcgggggggtgtacacccctttgtgatgtggttggtaatatccaggggggcagatgagggtgatatcactccccatatcgtggaaggcgtccacttttttgtgatgtggttctttatatcccgaggggagaaggtgatattactccccatatcgcgaagggcatacacccccctgtgatatagctcataatattccggagagtggaggaagatactatgccctatatcgcgggtggcctacaaccccctatggtttggcttataatatccaggggggagagggtaatattgctccccatattgtggagacgtacagccccctgtgatatggtttgtaatatctttggggggcgagggtgatattactccccatatcgcggggagcatacacccccgtgatctggttcatagtatctcaaaggaagaagttgatgtgtacaacttaagggaaaaagttgaagtgaagtgtacacacgccctgtgacgtggttcataatatccaggcgggggagaggagagtgatatttactccccatatcgcgggtgttgtaaactcccctgtgatatagttcataatatccaggggagagaggagggtgatattgctcctcatatcgcgaagggtgtacaaccccctgtgatatggttcataatatccagaagggtagaggacgatgatattactccacatatcttgggaggtgtgatatggttcgtaatatccagcgatgagagaatgatattactccccatatcgcaaaaggtgtgatagggtttgtaatatcctgagggggagagggtgatattaatccctatattgcagaaggactacaccctcccatgacatggtttgtaatatcccagggggtagagtgtgatattactttccatatcacagggggtgtgatatgattcgtaatattcgaagggggagagggtgacactactctccatatcacggggtgtgtgatatggttcttaatatcccaggggttagaggttgatattaccccctttttggggggtgtgtacaccccctgtgatatggttcgtaatatcccgggggagacagggtgacattattccccatatcgaggggatcgtacaccccctgtggtgtggttcataatatccctagggggagatggtgatattactccccatatcagggggcgtgcactcttctgtggtataattagtaatatccagggggcagaggtcgatattcgtttccatatcatgaagggagtacacttccctgtgatatggttcctaatatccaggggggagagggtgatattattccccatattgcggggggacatacaacccctgtgatatggttcataataaccagaaaagaagagggtgatattaatccccgtattgcagagggcatacaccccccctgtgatatggtttgtaatatctaggggaggaaaaggtgatattactttccatattgctgggtgcagacacccctttatgatatggttcataatatccaagttggagagggtgatattacttcccatatcatgggaggtatacccttccctgtgatatggttcgtaatatccagaaggggagagattgatattactccccatattgtggggggcgtacaccttcctgtgatacggtttgtaatatctaggggatatagtgggtgatattactcaccatatcacgggggttgtaacatggtttgtaatatccaggggaggagagggtaatgttactccccatatctcggggcatgtacaccctcctgtgacatggttcgtaatatccaggtcgggagagggtgatattactcctcatattgccgggggtgtgttatggttcataatatcctggggaaggaggctgctatcactctccacatcttgggggatgtacactctcctgtgatatggttcataatatccagggtgggtgagggtaatattactccccatatcgcgggaagtgtacatacccctgtaatattgtttgtaatagaagagagggtgatattactccccacatcgcgggtggtgcccacccccctgtgatatggtttggaatatccagggggatgaggagggtgatattactccccatatctcggtgggagtacatccctctttgatcaagttcataatatccaaaaggaaacaggagagtgatattactccccatatcgccgggggtgtacacgggagggggagtacacccccggcgatatggtctgtaatatccagggaaggagaggagggtgatattactcaccatatcgcaggtggtctacatttacctgtgaaacagtttgtaatatccagggggggaaatgagaatgattttttttttttgagtctcactgtgtcacccaggttggagtgcagtggcacgatcttggctcactgcaacccccgcctcctggactcaagcaattctcctctcccagcctcctgaatagctgggactacaggcgcaccccacaacgtctggctaatttttgtatttttattagagacggggtttcaccatattggccaggctgatctcgaactcctgaccctgtgatccatccgcctcggcctccaaaagtgctgagattacagatgtgagccaccacgcatggcccaaggagaacgatattactccccatatcccagggggtgtatatccccctgtgatatggttcagaatatccggaaggaaagacagggatattacttcccatatcgcaaggggtgtgacatggttcgtaatatcccatgggggagagggtaatattactcttcgtattgtgaagggcatacactcccctgtgatacagttcataatattccggggagtagaggaagatattatgctccatatcgcgggtggcataagccccctgtggtttggttcataatatccagggaggagagggtaatattactccccatattgtggggacgtacaccctcctgtgatatggtttgtaatatcccagaggggagagagtgatattactccccatattgcagggacatacacccccctgtgatatggttcaaaatgtcttttttttttgaaggactggttctttatttcaaaaagacacttgtcaatattcattatcaaaacagttgcactattgatttctctttctcccaatcggccccaagtagaccacatcaaaggagagtacatattaagccaataagctgtaggatgtacacctaacagacctcctagaaaccttaccagaaaatggggacagggtagggaaagaaactttaaaagatcaacaaactgccagcccacggactgcaggggctgtcacagccagatggggtggccagggtgccacaaacccaaagaagcaaagtttcaaaataatataaaatttaaaaagttttgtacataagctattcaagatttctccagcactgactgatacaaagcacaatgagatggcacttgtagagacagcagcttcaaactcagaaaagggtaatgagatgagtttcacatggctaaatcagtggcaaaaacacaatcttctttctttctttctttctttcaaggaggcaagaaaagcaattaagtgctcacctcaacataaggggaacatgatccattctgtaagcagttgggagggggtagagatggaacaaaattttggtctcagaggtcttgccatcttaatttggtcacttctaatgaaaaaaataaaaaatagaaataacattatccaaaggtatcttaaagctgaaaacttgaacagcacattttttgttgttgttgtttggctaactcctcctggaaccacctttctggcttagctagtactttgtacagagcaatgaggcttcccatagtggagtctccctgggctctgtttggctctcagcaaggcaggcctataccttttcctctcctccatggagagaggaatatgcattaaggtgaaaaatcaccttccaaaagtgagaaagggattcgatcgctgcttcagggctgtggtattatatggaatgttttacaaaaggttgctacaaaacaacaaaagaggtaattacaaaatgtgtacatcacaacatactttttaaagacattatgcattgtgctcacattcccttaaatgttgtttccaaaggtgctcagcctctagcccagctggaatctccgggaagaggcggacagtttggtgaaaaagacacagggaaggagcgggcggcggaaggagggggcggcgaaaggagaaagcagccttccagttaaagatcagccctcaattaaaggtcagcttcgggcaggctggcctcaggcggagtctggttcagagggaggagcagcagcagggtgagactgaggcgttctacatctcattcaggtcaagcagagtctggtccagcatcctttgtgtacagaggtgctcccctttggtgcatttcagtttatcttccaagtcatcaattgtcttttccagcttggctaccgatctctcagcaaactcagcatgggtctccgcctcctttattttatcagtaagaatcttgatctcttcctcatatttgtcttctttttgagagtacttttcttcagcagcactcagacacttcaggttctggtccatcagtctaatctgctcatccatctctcggcaaagggattctgccagctcagctcgttcctctgtgcgttccaagtctccttcaatgatcaccaacttacgagccacctcttcatacttcctatctgcctcttctgcaatgtgcttagcttctctgagttggatttcctggagttccatcttttcttcatcttttaaggcccggttttcaataaccttcttacctctctcactctcatcagcagctttttccgcttcttccagcttttgcagggcagtagccaggtgctcctgagcacggtccagctcctcttcaaccagctggatcccacgttcaaggaggccacctcagcctcagcctgttcccgggcccacctttctccctcaacttctcgctggaggcgctcagctcgctcctctgcatcatctgcctgctgctgcagaacctggatcttgcgcttcaccgcctcgatggtggtgatcccagccatggtgcccacccagctactgctagagctccggttcctgcctcctccgatcggcgttgcagcctcctctcacccttacttccgcctcggttcaaaatatcttaagggaaggagttgatattactccccacatcacgggaagtttacatcccctggtgatatggtttgtaatatcccagggtggatagggtgatattactctccatatcgcgaaggagtactcccccctgtgatatggttcataatatccttggggggagagtgtgatattactccccatatcgcgagggccatatactcctttgtgacatggttcgaaatatcccggtgggggagggggtagagggtaatattactccccatacagcgaagagcatacgcccttctgtggcaaggttagtaatacttcagggaaaagagtgcaatattacttttcatattgcagggaacatacactcccctgtgacatggttcgtaatatcccgggggctgagagggtgatatttctccccatatcaccgggggcctacacctgggtgtgatatggctcataatatacagggagggagagggtgatattactccacataccgagtgaggggttacacaccctcgtgacatgttcgaaataccccaaggaggagacaatgatattactttccctgtcgcgggggctacaccctcccagtgatatggttcacaatatcccggggtggagagggtgatattactccctatatcaccggggggtgtacacttccctgggaaatggtttacagtatccccggggggagagggtactattactccccatatcacgttacatatcagggtacacccccacgtgatatggtttgtaacatcccaggaggaagaaaatgatattactccccatatcgcggtggcatacacccctccccgttaaatggttcataatatcttggggtggagagggtgatattactccccatatcacgtggggcatacaccccactatgatatggttcataatatcccggaggggagagggagatattactctccatgtcgcggggggcatatacacccctgtgatatggtttgtgatatcccgggggcggagagggagatattactctccatatcgtggggtcgtacacttttctgtgatatgattcgtaatatccagacggggagagggtgatattacttcccatattgcgggggcgtacacccctctgtgatatggttcataatatcccgaagaaaagagggtgatattactcctcatatcgcggggaacacacaccaccctgtgatatggtttgtaatattcagcgggggagagagtaatattactccctgtatctcggatggcgtacactcccctgtgatatggttcataatatccagaagaaaagagggtgatattactccccatattccagggaatgtacaccaccctttgaatatggttcgtaatatccaggaggggagagggtaatattgctcccaatatcgaaggaggtgttatacggttagtaatatccagagaaggagagggtgacattactccccacatcgtggtgggtgtgcacccacctgtgatatggttcataatattcaggttaagagaggtgatattgctttccatatcgccaagggtgtacactcccgtgaaatacagttcgtaatatccaaaaggggagagggtgatattactcccatatcgtggggggtgtacacccctctgtgatatggttcataatatccagggtggaataaggtggtattactccctgtatctcggggcatgtacatcgcctgtgatatgattcataatatccagaagaagagagggtgatattaatctccatattgctgggggtgtacaaccccctgttgtatggtttgttacactgagttggggagagggttacattactctcaatatcgagtggggcatacacacttatgtgatatggttcataatatcccagggaggagagggtgatattactccccatatcgcgggaggcatacaccccaatgtgatatggtttgtaatatctacatttttttttttgagacgaagtctcgctcttgtcccccaggctggagtatgatggccggatctcggctcactgcaacctcagcctcccgggttcaagcgattctcctgccttggtcccccaagaagttgggattacaggcgcacaccaccacgcccggctactttttgtatttttagtagagaaggggtttcaccatgttggccaggctggtctagaactcctgacctcagatgatccacctgcctcggcctcccaaagtgctgggattacaggcgtgagccactgcacctggcctggtttgtaatatctatgaagggggaaggtgatattactttccatatcacgggaggcgtacaccacgatgtgatatggtttgtaatatccagggggtatactgggtgatattactccccatatcgcggggagtgtatacccttttgtgatatggttcctaatattaagctgaggagaaggtaatattactccccatatcgcaggggtttttatatggttcataatattcaggaagagagagggtgacattactctccatatcacggggtgtgtactcccccatgtgatatggtttgtaatatccagggaaggagaggttaatattactccccatatcgcagggggtgtacacctctctgtggtttgtaatatccaaagggaagaggatgatattatcttcaatatcttggggggatacagtccccagtgatattgttcataatatccagagggggaggggatgatattactcccaatattgcaggtggtgtacaaccccctgtgatattctttataatatagagggggatgatgatattactcccaatatagtaaacaacctgtgtgtacaccccctgtgatattgtttataatatccaagggtggaaaggatgatattactcctcatatcgcagggggtgtatacccctctgtgacattgttcctaatattcaggggaggagaagatgatactactcctcatatcacaggggatgtacacccccctgtgatacttttggtaatatccaggggaggagaaaattatattattccccatgtcacagagggtgtacaccccgctgtgatagtgttcataatatccaggtgaaaagaggatgatattactccgaatatctcaggaagtgtacacccttctgtgatattgttcataatatccaaaggtggagaggaggatactactccccatatcgcagtgggtgtacacccccctgtgatatggttcataatatccaatgtaggagaggatgatattactttccatatcgcggagagtgtacatccccctgttatattgtttgtaatattcagggagaaagaggatactactactccccatatcacacggggtgtatattcccctgtgatatggttcctgatatccaagagatattataatcctctcttggattatgctacctctcatatcgcatggggtgtacacacactttgtgatatcgtttgtcatatccaaggagggagaggattatattaatcccaagatcacggggggtgtacaccctcctgtgatattgtttgtaatattaaggggggagaggataatattactcccaatataattaacaccctgtgtgtactcctccttgtaatattgttcataatatccaatgggggagacgatgatattactttcaatatcgcagaggatgtacatccctttgtaacaatgtttgtaatataaaaggcaagagaggatgatactacttccaaaattgcaggacatgtacaccccccggtgatattgttcctaatatccagtggggaagaggatgatagtagtcccaatatcgcaaagggtgtacacaccccctgggatattgttcctaatataaaaggaggagaggatgctattattcccaatatcacagaaggtgtaaaatcccctgtgatattgttcgtaatattcaggaggggagaggattatattactcccaatatcacagggtgtgtacacagggaggggcaagggccagaagcgggcgggaatccccatgtttgggcggacccagtttctaatggccagcatttgccaatcaaagcttaccagagaactctaaaagccagggctttcctgctagacaagactcatttctggaactgctttaaaaagaaacaaaacttcccaaggaccccttttcctctctgtctgcctaaaataatgttttaaaaactcctaaagcagctgaattcagcccccttcctgggggaatgtatagacggaactcccacctttcccggcatcccaaggccagagtatgtgaaactcctgggtctctatgtgtgtctgagcggctgctctgccaacactccacacagccctgtgtcctggacccaaggcccttatgacctgagctcaagaggggatctcctgatccatgggttgcaaagatccatgggagaagcatggtttctggggcggggtcacacgctcagtcactgtttccctcggatgccggagatggttcctttggctctctgccaatacagggtgaatcatcatccatccctcttttctttgttctcccgggtcaagttgtttgcctagtcagtcccaatgtgagaacctgaatatttcagttgacgcgctgacttcaaaatccccgggcttcgggaggcggagcttgcagtgagccgagatcccgccactgcactccagcctgggcgacagagcgagactccgtctcaaaaaaaaaaaaaaaaaaaaaaaaaaaaaagtccccgggcttttcttttcactcagtggaaggcagctgcttctaattggccatcttggcccgcccccaccacgtgaccttctgtaaaatgcctccactctccaggaacgctctcattatataactttgcctgaaaccaacagcacgctcattgcacatatcatgggctcatttatttcacttataaagaacctggccaaggaagagatagtgcctaaagtggccagtattctgaccgatatgttagaaaaatggtgtgccgaccaattcatgacatgtgtcccaaaactagcaacggaaattgtattcgccgtgttgaggtctctaatccagatgatgctcatctatgtactggaaaaggcagagtcctttcctgacaagctgctgaaactcttcagaaacatctcatatttcctgaagaagatgatgtctggacaagcagcacaggtcgttcagatttaactttctattcatatatccagcacgatattcgcacaattgtcacgaaaccttaccagttgatgagtcctgcacatttcctttaatttcaggaggaagagggtaatccggatgagttttctgacctactctgctgctgtgattaaacaaccaccaggaaattttgacgacactgttctcctgagctcctccctttcctccgggaacaaaacaattgaatttacaaaaataaagtgttatttgactggagtgaggtctcatgtctgcttatgcggtggctcgctgctcagaacagggtgagtctctgggttgtgtgctgaggaggggaggctctcaatctggagaaaacccactgcaggggacacctccatggggtctgagggactgaggatgaggagccggactgggtctagggaaggaggaggtttcagagggtgaaattctggcactaaagcctgggggtgtttgggaacttcctccttccgaagaagtttcagggagggataaagacaaaccctgggctccttgaggggcccttactaatttgagaggactctatcgggaaggagagtgacaatggcctccttgaggactgaggcccctgaataaatgaggcccagatacagtccatgggggatgagaccttcaagggtcacattttggttgggacagaggaaaagtgcagctctgcagccgcagaggaaaacccggcagtgtgaaagcgaccttggaggggccctgtgcgctctgaatgcgtctgagcccccatcccctgtccccgcctctctttctggattcttccagctcggctgtctccgccatcttctgagcgctccaccctgacttattcaagtttcccttctgccttccaagtactccaaaatctttcagatctgtgtccctacccctgtttttagcatgtgttggggctccaggtccctgaaggtttctggcctgaaatccacctccccagcggagtggactgcgttctagagactccacactccgcgaggttcccaggcccctgagggacaaccgagtggcctgcgcacttcagggctccacactcggcaaggtctttcaagcccttggggtccccttcttagttttttccacctttctgggctgcagtcactccataaatgctgggatctgatccccacccccactctcgtttcctcaattctgcgggctacacgctctggcaaggtcctccgggccctggatcccctccctctccctatgcccacgctcctagtcagcccttctggggtccactattttcaggaactaaccgttctcatggagccttgctaaccggaaagctgtgtggaagaaaggctttgaggatagaggtggagatttggctcttccatagtgccactcacccaccccaccatgctgccactgccagacccggacccctgtttcagaacaagtgaccagattcgctcctggacagccctggacactggccttttctctgaaaactactcaccctttctctagtccccacttcatgccagcctcataccctcttccttcccccacgctggcttccgggatcctcctctgctcagacaacctcttctgtgtcccacccccgtttttagaatgctttggggcaccaggttgggggaaggtttctggcctgatatccatctctttccaaactcccttcttcccttgaaaggcttcttgccttcagccccacttctggctccgaggtttcaggacaccctcctcttcatcctcattcttttgaccaccagctttttaggaattcgaacgtccctctcatcttcgtgaatcctgtccaggcatttgttgaccccttcatctgatacccctgacctcacattgccaaaagtctacccctacccagtacactggaattagacaaaatcccaggagttttacctcaactctgagtgtgcccacaggagctctccctgaagccacgtccttttaagcagggtctagggttcctcccttgtcttaatgaactctttgtcacacggaggacgttatggagcccttatgatctttcactgcctttctgcccagcgttttgtctttccatggacatttataatattttccatggacattttgttctctcaatgtccacccctaatttccaacatcccaaagattctcatgtgtttcctgaaagccatttacaggaatggctgtgcccagacccccttccccaggatcctccttcacacctggtaggtgcctctcctagagagatttgcactcagttgtcgtgcagtcacatggcccagatggttgttaatcacccccttcctggcaacagctagcagccagggaatcactggcacagaaacctcagggtgaccaagatgaggccacctctgtgctgaaggctgtgctccagagcctgcttgggatcaggcttaagcaggtcttcagccagacctgatgttacctggtttccttgagctgccctgcctgagctatcgggagcactccctcaatgcacatcttgattccctatctcatgctctgcttctagaaaccatgagctatcaattgctactggcaatggtcctgggaagtcaaccctaagtatggattctggggttggatgactccccacaggacttcagtgagcaacaatcactgctggcagttggaggacagagtcgctagggcatgtgaccactgtgaaaccaccgatgtttcacctggggtaattttggatgaactacggtagaagcactgaaggtacattgcttttggtttggaagattgtaggtaaataatagcgatatgaatgtggaattggatggctgcaaacgagtgccattgatgcattgaaagaggaaaagtcaggctgtcacctgtcactcagcaatttaaagtgtgagagttgggactagatgtggtggctcacatctataatccagagattcgggggaagcttgaagaggtaggatcttttgagtccaggagttccagaccagcctggacaccagagcaagacctcatctctacaacaaaattttcttaaaaattagatgggcttggtggcacgcacctgtacttgtagatctagctaatggggagcatgagataaaaaaatcacctgagtcagggacttaggggttacaatgaggtatgattgtgccagtgcacacactcccacctggccaacagagtgagattctgcttccaaaaaaataagaaataaatcaggtttgagagttggaaagcatcatcttctcctagagccaaaggacatgtacaactgagacccaggaacaaagcttcatcacaaagagaccatcatcagtggagccgggagatgcattccccctcaccctgccttgaggaggcagtggagtcatctgtctgggatcctttctgacccagccctatttgtttgtctctttggcttctttggatttgtatattttagctgttataacactgtaaaacaaacagagtgatttttttgagttgtgtgaatgatgctagctccatagtcaccctgagagtgatgggaacttttgaatttgtggcaagttggagggtagtgtaagtgacctgagattgccaaattggggctagcactggatgtgaggttaggctagtggaaaaatatgcccagaaccagaggagtgtgggctcactgcaggtggttaggctcagatccaaattgtacagatggatagctttggggtaaagaataacatagttgagaagtgcatgtgttagtctgttcatgcactgctataaagaattacctgagactgggtaattatttataaaactcaggtttaattgggtcatggttccacaggctgtacaaaaagtatgatgctggccatcagctcaacttctggggaggccccagaatagttagagtcatggcaaaaagtacaagggaagcaggctcatcttccacggccagagctggagcaagtggtaggagaggtgatacacactttcaaacaagtaggtcttttgagaactccatcaccggacagcacctatgggatggtgctaaattattcatgaaatatccgcctccataatccactcaactgtcaccagcgcagccagccccacctccaacagtggggattacaattccatatgaggtgtgggtggggacacagctccaacctcaatcagtgggcatcctggattgggtctactatagaaggagaaccaggagctgactatgatcttgaaccctacccatgatggccgggcggggtgactcatgcctgtaaccccagcactttgggaggctgaggtgggtggatcgcctgaagtcaggagttagagaccagcctggccaacatggtgaaaacctgtctctactaaaaatacaaaaaattagaccggcgttgtgctggatgcctgtaatcacaccactacgctccagcatgggaaaaaataccaaaacttcgtctcaaaaaaaaaaaaaaaaaaaaaaaaaaaaagactgcccatgaccactgcaccagtgagagggacaccagcatcactgagatgcaagggctggacattcttcataggtcagagctcaaagcaggggacactgatacagagatgggctccatccatagcaccaaagtggtgagaggatgtgggaatggcagaggccagcactttgccatcaatgcaagggggtataaggaggtgacaccagtgccagagtacatcacggggggactgccctacaatatctaggacttacctcttagagcgtgtttcattagcgacaacagatataaatggcagacaggtgtgtccctgcattaacaggaaatagaaatcatcaagaggaacagaaggcagatgtcagcagccccttagaaagtcatcatccttcatacagttaaaatctgagacagttctcacacgagaaggcctaactcaaaaagaggctgggttctcatgaggcaggtttatgcaaaaccaaggaaggtgtacaagtttggaattctccagtttcccttggaaaagacctacagtcatttgcttaggtaactgagcactgaacaaaggtgagtattgttgtcttttagaagctcttggccaagaaggccttgttggcataaaacccatggtttggaaacatcaccatgacccctgttagagtaatggcctaagggtgggggtcaggaaattgatgtattccttgccaacttctgcctctaagtgagtgaactctgtttgtgaacctctctcctctgtggttatgttcctaggctctcatgtataatcaggagtcatagacttagaaacaggaaaaatacttacagtgtttttgtggcctgtgagctatgacttataattttaggaaaaaaacaattgcaaatggaaagcctaagtctatcaatgctcatccaagacaacataatcaataaaaaccaatatcaaatctcaaggcaaattatttcctgtatatagatggcagagatgagcaccaccatcaaaaactcaaggaccagtgctgtgggtccagtcatctgtttcatggaattcaccagtctggtatcttcaaaatccagaaggatgatggcagatggcaggaaagtaatgcaaacgtcatcaggtgtgaccccactgtagcagctgtgatggatgttttctctcaccatagcaataaataacacaacctcggtcacactgtatgcattgttggtctgcaaaatccatgttttgcaaaactcttcaggaaggtggatctgtaatattggcattgacatgagaacaacagcagtatttattcacaatctcaagctctctgtcttcccgtctctctcattagccatccaagtagtcctgaggaaccaagcccatcagaacattctgcaacataatacacagctccattctccattcaaattttgttgttgttgttgttgttgatgagacaacatcttactccatcagccaggctgacgtacagtggggctatctgggctgactgtagtcttgagcttccaggctcaaggcatcctctcacctcagcctcctaagtggcttgaactacagacacacagcgacatgctgggctagtttttgtatattttgtagagacgtgctctcaccatgttattcaggctggactcaaactcctgagcgtaagtgatccaagcaccttggcctcaaagtgctgagattacaagcctgagccactgcacccagcccaatctccattctactgataacaatgtcattaccaggtctgatggacaggaaatggtaaggtttctgaaaacctaaggatcacacagcgagttccaaaggctgaaagtgcatacctgtcgacactgataccaatgacatccaatggtgagaatgacattccttgtagtcctagctctgctcataacaaatctatactgaagtgtaagagtttgatggtcatggggattttccatgtctctgcctttcagcgatgtgccatatctgtgaagtgttcagaaatgcaacagcctgaggcatgctgggcatatcctctaataaaaaggaaaatgccattttatggtcctgtatttctacaagttggaacacatgggcctgtgatccagatgggggaaatgggaatattcccactcattcaccttcatccacgaagcccatttgaaagctttgggcttcccatccttgtagattttagtgttgtgggctgggtgcagtggctttcacctgtactgccaacactttgggaggcctagacaggtgaatccactgaggccaaaagttcgagaccagcctggccaagatggtgaaaccccgtccctactaaaaatacaaaaattagcaaggtattggggccagcacctgtaatcccagctgctcgggaggctgaggctggagaatcgcttgaacccaaaaggcagagactgcagtgacccgatcctgcctttgcactccacctgggcaagcagaacaaaacttctgtcttgaaaaaaaaaacaaaaaacgaacaaaaaagatgttagagttctgggtttagaggtctataccccagaaagagaatggtttcaacaagggacaaagaagttgctttaaacgttgacttgccatttcttttcagtgtgtttgttctcttgcgtcaagagaccaccagaaaagtggtgcaattactctcctgtcaagaatcattgactatcatctgcaagagggtcagatcctggtatataattagggcagaaatacttagtctgagaagggtatgacatccagaggccctattaatgatgtccttttctccatgcctgactctgaccccatgtgctggactgcccctgtgtggatggcctcatggcctgctcggactctgaggtcccaccccaagtggcacctccatggagggctctactcttgtatgggctctgacactcacactgagacactctcccatggacacctcttcacccacttggggtctgaaactgggctactccatccctccctaacctggaacagagagctttcactgctattacacaagtcatagaggctaactcctcatttttccaagctaattattgaaacattagtcctgggttgataagacaagataagttaacttttcataaatttgcttatcaagttttgaataaattcaaataaattcaccttccccacacaccttagttgtcgacatcacacgcgcacccatactcacagggtgagcacgaaggcttcactgtcagtggagaaagtggcaaaacccttctgtgcctcatcctggtctagacctggccctcatcctttcccactcttcccctcactcccttggattcatccacactggcctcctgcctgctgctccacctccctgcgaagctcacccctgcctcagggcctttgcacgtgcagtggcttcaagccatatcctcttcacccagatctcccagatctcctgaatgatcttcttttatcattcaggtctcagcttgcatgtaatcttctcagtgaggattacccaaaccacatagttcattcattcattcaaatattcattcaatggcatattgacaaagcagctacttcatgccaggccttgggccaggtgttatggatatggcaacaaacaaaacaagagttttctgctctcaaatttttacccacttaaaggagatatcatacatcatctgtaaataaatacatcatctgtaaataatgatgtaaataaatacatcatctgtaaatctgtaaataatgatgtaaataaatacatcatctgtaaataaataaagtataataaaagaaaatagtaggtttttttggttggaggtgaccgtgaagtttgcaaataccatcttacaacacattattttattttatttcatttcatttttaattttattattattatactttaagttttagggtacatgtgcacaacgtgcagatttgttacatatgtatacatgtgtgaagttggtgtgctgcacccattaactcgtcatttagcattaggtatatctcctaatgctatccttcccccctcccccaccccacaacagtccccggtgtgtgatgttccccttcctgtgtccatgtgttctcattgttcagttcccccctatgagtgagaacatgcggtatttggttttttgtccttgtgatagtttgctgagaatgatggtttccagcttcatccatgtccctacaaaggacacgaactcatcattttttatggctgcatagtattccatggtgtatatgtgccacattttcttcatccagtctatcattgttggatatttgggttggttccaagtctttgctattgtgaagagtgccgcaataaacatacgtgtgcgtgtgtctttatagcagcatgatttataatcctttgggtatatacccagtaatgggatggctgggtcaaatggtatttctagctctagatcactgaggaatcgccacactgacttccacagtggttgaactagtttacagtcccaccaacagtgtaaaagtgttcctatttctccacatcctctccagcacctgttgtttcctgactttttaatgatcgccattctaactggtgtgagatggtatctcactgtggctttgatttgcatttctctgatggccagtgatgatgagcatttcttcatgtgttttttggctgcataaatgtcttcttttgagaaatgtctgttcatatccttcacccactttttgatggggttgtttgtttttttcttgtaaatttgtttgagttcattgtagattctggatattagccctttgtcagatgagtaggttgtgaaaattttctcccattctgcaggttacctgttcactctgatggtagtttcttttgctgtgcagaagctctttagtttaattagatcccatttgtcaattttggcttttgttgccattgcttttggtgttttagacatgaagtccttgcccgtgcctatgacctgaatggaaatgcctgggttttcttctagggtttttatggtttgaggtctaacatgtaagtctttaatccatcttgaattaatttttgtataaggtgtaaggaagggatccagtttcacctttctacatatggctagcctgttttcccagaaccatttattaaatagggaatcctttccccacttcttgtttttgtcaggtgtgtcaaagatcagatagttgtagatatgtgacattatttctgaggactctgttctgttgcattggtctatatctctgttttggtaccagtaccatgctgttttggttactgtagccttgtagtatagtttgaagtcaggtagcatgatgcctccagctttgctcttttggcttaggattgactttgcaatgcggggtcttttttggttccatgtgaactttaaagtagttttttccaattctgtgaagaaagtcattggtagcttgatggggatggcattgaatctataaattaccttgggcagtatggccattttcacgatattgattcttcctacccatgagcatggaatgttcttccatttgtttgtatcctcttttatttcattgagcagtggttttagttctccttgaagaggtccttcacatcccttgtaagttgggttcctaggtattttattccctttgaagcaattgtgaatgggagttcactcatgatttggctctctgtttgtctgttattggtgtataagaatgcttgtgatttttgtacattgattttgtatcctgagactttgctgaagttgcttatcagcttaaggagattttgggctgagacaatgggttttctagatatacaatcatgtcgtctgcaaacagggacaatttgacttcctcttttcctaattgaataccctttatttccttctcctgcctaattgccctggccagaacttccaacactatgttgaataggagtggtgagagagggcatccctgtcttgtgccagttttcaaagggaatgcttccagtttttgcccattcagtatgatattggctgtgggtttgtcatagatagctcttattattttgagatatgtcccatcaatacctaattattgagagttttcagcatgaagggttgttgaattttgtcaaaggccttttctgcatctattgagataatcatgtggtttttgtctttgggtctgtttatatgctggattacatttattgatttgcatatattgaaccagccttgcatcccagggatgaagcccacttgatcatggtggataagctttttgatgtgctgctggattcggtttgccagtattttactgaggacttttgcatcaatgttcatcaaggatattggtctaaaattctcttttttggttgtgtctctgcctggctttggtatcaggatgatgctggcctcataaaatgagttagggaggattccctctttttctattgattggaatagtttcaggaggaatggtaccagttcctccttgtacctctggtagaattgggctgtgaatccatctggtcctggactgtttttggttggtaagctattgattattgccacaatttcagatcctgttattgctctattcagagattcaacttcttcctggtttagtcttgggaaggtgtatgtgtccaggaatttatccatttcttctagattttctagtttatttgcgtagaggtgtttgtagtattctctgatggtagtttgtatttctgtgggatcagtggtgatatcacctttatcattttttattgcatctatttgattcttctctctttttttctttattagtcttgctaccggtctatcaattttgttgatccttttaaaaaaccagctcctggattcattaattttttgaagggttttttgtgtctctatttccttcagttctgctctgattttagttatttcttgccttctgctagcttttgaatgtgtttgctcttgcttttctagttcttttaattgtgatgttagggtgtcaattttggatctttcctgctttctcttgtgggcatttagtgttataaatttccctctacacactgctttgaatgtgtcccagagattgtggtatgttgtgtcttttttctcgttggtttcaaagaacatctttatttctgccttcattttgttatgtacccagtagtcattcaggagcaggttgttcagtttccatgtagttgagcggttttgagtgagtttcttaatcctgagttctagtttgattgcactgtggtctgagagacagtttgttataatttctgttcttttacatttgctgaggagagctttacttccaagtatgtggtcaattttggaataggtgtggtgtgatgctgaaaaaaatgtatattctgttgatttggggtggagagttctgtagatgtctattaggtccgcttggtgcagagctgagttcaaatcctgggtatccttgttaactttctgtctcattgatctgtctaatgttgacagtggggtgttaaagtctcccattattattgtgtgggagtctaagtctctttgtaggtcactcaggacttgctttatgaatctgggtgctcctgtattgggtgcatatatatttaggatagttagctcttcttgttgaattgatccctttaccattatgtaatggccttttttgtctcttacgatatttgttggtttaaagcctgttttatcagagactaggattgcaacacctgcctttttttgttttccattttcttggtagatcttcctccatccctttattttgagcttatgtgtgtctctgcacgtgagatgggtttcctgaatacagcacactgatgggtcttgactctttatccaatttgccagtctgtgtcttttaattggagcatttagcccatttacatttaaggttaatattgttatgtgtgaatttgatcctgtcgttatgatgttagctggttattttgctcattggttgatgcggtttcttcctagccttgatggtctttacaatttggcatgtttttgcagtggctggtactgactgttcctttccatgtttagcgcttccttcaggagctcttttagggcaggtctggtggtgacaaaatccctcagcatttgcttgtctgtaaaggattttatttctccttcacttatgaagcttagtttggctggatatgaaattctgggttgaaaattcttttctttaagaatgttgaatattggcccccactgtcttctggcttctagagtttctgccaagagatcagccgttagtctgatgggcttccctttgtgggtaacccgacctttctctctggctgcccttaacattttttccttcatttcaactttggtgaatctgacaattatgtgtcttggagttgctcttcttgaggagtatctttgtggcattctctgtatttcctgaatttgaatgttggcctgccttgctaggttgcagaagttctcctgggtaatatcctgaagagtgttttccagcttggttccattctccccatcactttcaggtacactaatcaaacgtagatttaatcttttcacatagttccatatttcttggaggctttgtttgtttctttttactctctttcctctaaacttctcttctcacttcatttcattaatttgatcttcattcacttatatactttcttccacttcatcaaatcggctactgaaggtattgcatgcatcatgtagttctcatgccatggttttcagctctatcaggtcatttaaggtcttctgtacattgttttctctacttagccattcgtctaatcttttttcaaggtttttagcttccttgtgatgggtttgaacatcccctttagctcagagatgtttgttattactgaccttctgaagcctgcttctgtcaacttgtcaaagtcattctccatccagctttgttccattgctggtgaggagctgcgatcctttggaggagaagaggtgctctggtttatagaattttcagcttttctgctctggtttctccccatctttgtggttttatctacctttggtctttgataatggtgacctagagatggggttttggtgtggatgtcctttttgttgatgttgatgctgttcctttctgtttgttagttttccttcgaacagtcaggttcctcagctgcaggtctgttggagtttgccggaggtccactccagaccctgtttgcctgggtatcaccagcggaggctgcagaatagcaaatattgcacaacagcaaatattgctgcctgatccttcctctggaagcttcgtctcaaaggggtgcctggctgtatgaggtgtcagttggcccctactgggaggtgtctcccagttaggctagatgggggttagggacccacttgagaaggcagcctgtccattcacagagctcaaacactatgctaggagagccactgctctcttcagtgctgtcagatggggatgtttaagtctgcagaaatttctgctgccttttattcagctatgccctgcccctacagatggagtctacagaggcaggcaggcctcattgagctgcggtgggctcctcccagttcgagcttccagaccactttgtttacctactgaagcctcagaaatggtgaacacccctcccccacccagtctgccgccttgcagttccatctcagactgctgtgctagcagtgagcgaggctccatgggcgtgggacccactgagccaggcacaggatataatctcctggtgtgccatttgctaagaccattggaaaagcacagtattaaggtgggagtgtcccaattttcccagtacagtctgtcacgggttccctcatctaggaaaggtaaatcccctaaccccttgtgcttcccggtgacgcaatgccccaccctgcttcagctagccctccatgggctgcatccactgtccaaccagcccaatgagatgaacaaggtacctcagttggaaatgcagaaatcacccatcttctgtgtggatcaggctgggagctgcagaccggagttgctcctattcggccatcttggaatggcaatctatgtttgctttttacatttgaaaaaactggtgtcacgtacctaggtattaatcattgtggtatcctcttgccgatttacctctttatcattaactagtgaccctccttgtcttttgttgttacagtctgtgattttagtctattttatctaatatgagaatagctactctggcacttttttggtttccagcttcatgaaatatccttttccatttccctgttttcatttccctttcggtgtctctatagatgaagttgatttctttaaggcaccataagttgggtcttatttctttatccatttgaccatttagagaatttagaacactgtcagtgttattattcataagtaaaaacttaagagtgggtgtagtggtgtacatctgtatttcctgcactttgagagactgaggcgagctgatctcctggggtcaggagtttgagaccggcctggtcaacatgatgaaaccctgtctctactaaaaatacaaaaattagccaagcatgctggcatgtgcctgtaatccaatttacttgggaggctgaggcaggagaagcttgaacctgggagacaaatgttgcagtgagctgagatcacacagagaagtcatctccactctcctcatcagaacctcttgttcacagcatttgtgagcacaaatcaatgatggttattctttcctactaattagggatattttattacacagcaatagcctccagcaaagggaaccatcatacatgattcctacaagttgacagggctggaattatcactgaaaaactaaggtggctatacttgattcccaatgtccaatttttcatgaatagagaaatttatcctttttccccccagccagaaaccaagttttgctcttacgcccaggctggaatcaagtggcacaatctcagctcactgcaacctctgccccccagcttcaagaaattcaccttttgaacaaggagatattaaggatacactatgtgtatgctaccggtggttgcaggagactcagaaaagagagaaacagtcactggcctcgtgcaactgatattctcgggaggagagaaaggcaatcaagaaagaaacatgctgtatttcagacagctgtaagtcctccacaagaaaagaaagcaggtgaggaacataggaaatgtgtcaaccataaggttcccgctaattctataagttggtcagggatatcctccaagaataagcagcatctgagcaatcacctgaagggaggaaggaaggaagactgtgagtggtggcttacacctgtaatcccagcactttgggaggccaaggagggcagattgcctgagctcaggagttcacgaccactcagagcaacctgttgatacccaatctctactaaaaacacacaaaaaaattacccgggtgtggtggcacgcacctgtagtcccagcttccatgcccagctgatttctctctctccatatatatatatatatacacatatattgtttttgcagagatagggtctcactgtgtcacccagtcatcaagcaattctcttatactgttttggaaaagcatgggaattacaggtgtgaaataccctgctggtcctgaaaaatgtgatatttgggattctctgcctggcttgttttacccaaaataatgacctccagttccttccaggttgctgcaaaagacatgattttcactgttttataactgaatagtattcctgtatgtatacataccacattttctttatttattcttctgttgattgacatgtagggtgattccatgtctttgctactgtaaataatgctgcagcaaatatttgtgtgcattttgatctattcctttgagtaggtacccagtactgcaactgcaggactgagtagttgttatattttttgttctttcagaaatctccatagtgtttgccataaaatctgcactaatttacattcccaacaacaatgcataagatttccccttttctccacattctcactaacatttgttatgtttttgtctttttcataatacccattctgactggagtaagatatctcattgtggtggttgttgatatttttgagacggggtctcactctgttgccagactggagtgcagtggtgtgatcgtggcttgctgcaacctccacctcccgggttcaagcaattctcctgcctcagcctcccgagtagctgggactacaggcgcgtgccaacaggcctggctcattttttgtatttttagtaaagacagggtttcaccatgttggccaggatgatcacagtctcttgagctcatcatacacctgcctcagcctcccaaagtgttggaattacagtcatgaggcagcgcacccaacctcaatgtggttttaatgaccatttctctgacgattcatggtgtggagaatttctttgaaataccttttggccatttatatgtgctcttttaaaaactgactcctgtccaggtgcggttgagcatgcctgtaaccccagaacttcgggaggctgaggccaatggatcacttgaggcaaagaggcagaaatcagcctggccaacaaggcaaaaccccatctttactaaaaatacaaaaaatcagccacgggctgtgactcgtgcctgtggtgcaagttactcaggaggttaaggcacaggaattgcttgaacccggtaggcacaggtcacagtgagccaagatcatggcactgcactacagcatgggtaatagagaaagacctgtctcataaaaacaaatgaataaataaataagataaaaaataaaaaagtctctttatgtcctttgccgactttttaatgggattctttggagttttctgttgtagttgagatctttgtttactctcggtattagtcttttgtcaaaggaaaagtttacaaataatttcttccgttctgcagtttgtctgctcactctgttgagaggattatttctttggctgtgcagcagctttttgtttcagtaaagcttttgaatttatataattaaaattttcagtttggtttaaatttgcactggtcgatttttggttttgttgcctgtacttttgaagtcatactcttgaactctttactagacaataaccagaagagttttctctagttttcttctcacatttttattatttcagtacatatatttaagtctataattcatcttcaattgatttttgtagaaatagtgagaaataggagtccaggtttattcttctgcaaatgacaattcaattgttccagcaccaattattgaaaagggtgtgctttcctcaacgtatattcttatcagctttgtcaaagatcagttggctataaatgtgtggctttctttctgggctctctagtctgttacatcaatctgtgtgtctatctgtatactactaccatgctgtattggtgatgatggctttgtaatataatttgaagtcaagaaatgtgatgctcccagctttgtttatttgcttcagaaaggctgagtcaacagctgcagagatgaagctgcccctcctcgcagggctccttcccggaaaaagatcatggctcccactgaccatataaccatggctggaactcctgaaattcccaaagggaggccctacccagtgaggggggatgaatgaaggtcctacttaaggaatctgtctggccacaatcaggcacagcagctgtgctgccttgtgggggaccagaccacctggattccctggagcctgcaggctagaatgtctgagtccatggaaacacagaaatggaggccgccctcacctccccagaaaactgtagtctcaggcagtctccagccgattgccactggttggctgctattccaagccagtgggtcttaacttgagaggtgctgtggaagtggggcccacggaatgaggctgcttggctccctggattcagccccttttctaagggaatgtacagatggaactcccgccttgcccagctttccaagtatataaaactcctgagtctctgtgagtgtctgagcgagtgctctggcaacattcgacacggctctgtgtatctgacccaagacccttatggcatgagctaatgggaggatcttctgatccatgcgtggcaaagatgcatgggagaaacatggtttgtgggtaggggttgtgcattcactactgcttctcttggctgtaggtgaaggtttctttggctctgtgctgatactgggtgcaccatcacccaccccctttgtttcttctcctgggtcaagtcatttgcctaatcagtcccaatgtaggaacctggatacttcagttcaaggtgctgaattcaccgtgcttttcattcaggggaagacagctgcttctcattgggcatcttggcctgcccacttcacgtcactttttgtaaaatccacaccactccaggaatatccattacttaacttcgcctgaaataaacagaaggctcattacacttatcatgggctcacttacttcgcctataatgaaggtgccatggaaatgctagtggatgacgtggtccattttcttagggatgagatagaaaaatggtgtatggctttttaatttaattaaaatttttagtttggtttaaatttacattggtctctttttggttttgttgcctgtacttttgaagtcttactcgtgaactctttactggacaatgaccagaagagttttccctaagtttcttctgatattttgaccatttcagtacatacatttcagtctataattcactttaaattgatttttgtaaacatggtaagaaataggagttcagatttattcttccgcatatgataatgcaactgtcccagtaccaattattgaaaagggtgtgctttccctagtgtatattcttgtcagctttgtcaaagatcagttgcctatgaatgtgtggctttcattttggattctctcgtctgttacatcaatctgtgtgtccacatttatacctgtaccatgctgtattggtgactatggctgtgtaatatattttagagttaggaaatgtgatgctcccagctttgttcatttgcttcagctgaaaaggttgagtccacaattacaaagatggcagccgcccatccccggaggacctccaacccagaaagagatcaggcttcccaccaaccctataaccctggctggagttcctgaaattccaacagggaggaccttcccagtgaggagggatgaatcaaggtcaaatttaaagaaacagtctggccactatcaggcacagcagcagtgctgccttgtgggggacccctcctgctccagaccagctgccctccctggagcccgaaggctagattgtctgagtctacggaaacagagacggtggccgccccaaccacccagaactcggtagtctcaggcacttggcttgctatcttgccactgcttggctggtattccaagcccgtgggacttgagaagtgctgtgatgatggggaccacaggatgaggctgtctggctccctgtgatatggctgtgatgagtggaggaacaccagggctcatgtctcacacagaattggagaaaatgacacaaacacatgtacagtggttttatggcgtgcagtttaataggcaagaacgaaggaagagctccccatactgagacagagggaggggggctccaaagccaaaagaggaaacccggagtgctgtggataccaatgagttatatgaagaaactggagggggcggtgtctgatttgcatagggttcaggcgattggttcgaccaggcatgtcatttatgtggcccacggaaaaactggccctcccacctagcctttgaatatgcacgtgccggacaccctgatttcctacactcatggggatatatgggggtggccatatcgccaggcacaggtggggacaagggccagaagagggcgggaatcgctatgtttgggtggacccagtttctaatggccggcatctgcagatcaaggttaccggagaactctaaaagccggggctttcctgctagacaagactcatttctggagctgctttaaaaagaaacaaaacttcccaaggaccccttttcctccctgtctgcccaaaataatttcttaacaactcgtataacacctgaattcagcccccttactgggggaatgtaccaacggaactcccacctttcctggtttctcaaggctagattgtgtaaacctcctgggtctcggtctgtgtctgagcagctgctctgccaacactccacacagccctgtgtactaggcccaaggccgccgtgactcagcccatgggaggatctcctgatttcttggttgcaaagatccatgggagaaaaatggtttctggggcggggtcacacactcatggcttctcttggctgtgcaagaaggttcctttggctctgttccaatatagcgtggttcatcacccacccctgttttctttgttctcctgagtcaagttgtttgcctagtcagtcccaatgtgagaacctgaatatttcagttcacgtgcttatcgtgaaattcactgagactttaattcagtggaaggcagcctcttctaattggccatcttggcccgccccctccacgtcacctcccataaaatggccacgctctccagggacgatgccattatatatctttacgtgaaaccgacagaacacttattacactttttgtgagctcatttacttcacttataatgaacatggccatggaaatgctagtggagaaagtggtcgattttctgatggatgtgataaaaaaatggtttgccgaccaattaatgacatatgtctcaaaactagtaacgagacccttaatcgctgggttgaagtttctaatcaagaagatgctcatctatgtattcaacaaagcagcttcccttgcttctgaaatgcttccaaacaacatctcatatttcctgaagaagataatgcctggacaagcagcacaagtcattcaggtttactttcagctcataaatccagcaggatattcgcacaattgttgggaaaccttatcagttcatgagtcgtgcatgtttcctttaatttcaggaggaagagggtaatctggaagagtttcctgacctactctgctgctgtgattaaacaaccaccaggaaattttgatgacactgttctcctgagctcctccctttcctcggggaagaaaagcattgaaactacaaaaataaagtgttatttggctggagtgaggtctcatgtctgcttatgcggtggctcgctgctcagaacagggtgagtctctgagttgtacgctgaggaggggaggctgtcaatctagaaaaaacccattgcatgggacacctccatggggtctggggggctgaggatgaggagctggactggatctagggaaggaggaggtttcagagggtgaaattctggcagtaaatcctgggggtgtttgaaaacttcctccctcagaaggagaagactcagggaggaataaggacaaaccatgggtcccttgaggggcatttactaacttaagaggactttatcgggaagcagagtgacaatggcctccttgaggactgaggcccctggataaatgaggcccagatccagatccagtccatgggagatgagaccttcaagggacatatttttgttgggacagaggaaaagtgcagctctgcagctgcagaggaagccttggcagtgtgaaagcgaccttggagggggccctgtgcgttctgaatgcttctgaggtccatcccctgtccccgcctctttttctggattttttgggctccatggtctccgccatcttctgagcgctccacgctgccaccttcagttttctcttctgggctccaaatactccaaaatctttcatatctgtgcccctacccctgtttttagcatgtgttgggactccaggtccctgaaggtttctggcctgaaatccacctccccagcggtgtggattctgctctagagaccccgcacttggcaaggttcccaggcccctgggggacaaccgagtggtatgtgcacttcagggctccacactcggcaaggtctttcaagcccttggggttccctcctcagttttcttcacatgtctgggatgtagtcactctataaatgccgggatgtgatccccaccccagtgattttttttagttccatgagtgttgctatctgaatagtcatcctgagagtgatgggaccttttgaatttgcagcaagttttagattagtgtgagtggcctgagatcgcaaaactggggctagcattggatgtgaggttaggctggtggaaaaatttgcccagaacctgaggagtgtgggctcactgcaggtggttaggatcagcacagaattgcaaggatgtatagctttggggtaaagaataacatggttcagaagtacatgtattagtcttttcatgcattgctataaagaattacctgagactgggtaattaattataaaaactcaggtttaattggctcatggttccacaggctgtacaaaaaggatgatgctggccatcagctcaacttctggggaggcgtcagaaaacttagagtcatggcaaaaagcacaagggaatcaggctcatcctccatggccagagctggagctagtggtaggagaggtgctgcacacttttgaacaatcagatctttttagaactctatcaccagacagcacctagaggatggtgctaaattattcatgaaatatccacccatatgatccactcaattctcaccggcccaaccaggaccacctccaccattggggattacaattacacatgagatgtgggtggggacacagatccaaactcgatcagtgggcatcttggactgggtctactatagaagaagaaccaggagctgactatcatccttaagactgcccatgatggccaggcagggtggctcatgcctgtaatcccagcactttgggaagccaaggtgggtgaatcccctgaggtcaggagtttgagaccagcctcgccaacatggtgaaaccctgcctctactaaaaacacaaaaaattagatgggtgttgtgccagacgcctgtaatcacagctactccagaggctgaggcatgagaattgcttgaacctgggaggcggaggtggcggtgagccccaatcgcactgctacactccagcatgggcaacaataccaaaacatcgtctcaaaaaaaaaaaaaaaaaaaaaaaaggctgcccatgaccactgccccagtgagagggacaccagcatggctaagatcaagtgctggacattcttcatgggtcagacattaaagcaggccacactgttacagagatgggctccattcatagcaacaaagtggtgagaagatgtgggaatggcagaggccagcactttgccatcaatgcaaggtgggcataaggagctggcaccagtgccagagtgcatcaggggaggactgctttgcaatatctagcacttacctcttagagtatgtttcattagggacaacagatataaatggcagacaagtgagtcccttcagtaacaggaaatagaaatcatcaagaggaacagaaacagatgtcagcagccctcatataaagtcatcatccttcatccagttaaaacctgagacagttctcacataagaaggtctaattcaaaaagagactgggttctcatgaggcaggttcatgcaaaaccaagggaagtatacaactttgggattctccagcttcccttggaaaagacctacaatcatttgcttaggtaactgagcactgaacaaaggtgagtattgttatctttcagaagctgttggccatgaaggtcttgctggcataaaacccatggttggaaacatcaccatgacccctgttagagtaatggcctaagggcaagggtcaggaaattgatgtattccttgccaacttctgcgagacgagtgttggtccactcatctctttcacggaattcaccagtctggtatcttcaaaatccagaaggatgatggcagatggcaggaaactaatgcaaacaccatcagttgtacctccactgtagcagcagtaatggatgttatctcttcattgtaatatccagggagggagaagatgacattattctcaatattctaaacaccctgtgtgtacagcctctgtgatattttttgtaatatccgtgtgggagagaattatattactcctaatatctcaggggttgtgccccctctgtgacaatgttcctaacacccaggaggggataggatgatatcacttttagcatcacagggggtgtacaccccactgtaatattgttcataatatccgggggggagagaatgatattactcccaatatcgcaaagactgtacaccaacctgtgatattatttgtaatatccataagaggaagaataatattactcccaatgtcacaggaagtgtacacccttctgtgatattgttcaaaagatccagttagggaggggatgatattactctcaatatcttaaacaccctgtaggtaagccctctgtgatattcctcataatatccagagggagaggatgatattactcccaatattgcatgaagtctacaccccacctgtgatattgttcctaatatccaggatgggagaggatgatattactcccaatgtcgcaggggatgtacaccttccctgtaatattgttcgtaatatctagaaaaggagaggataatattactttcaacatcgcagggggtgtacaccttccttgttatattgttgctaatatccagggaaaaagaagatgacattaccaccactattgcagaaggtgtacacccccccttgatatagttcctaatatccagaaaaggagaggagatattactccaaatattgcaagaggtgtacattcccctgtaatatttttcctaacattcaggaagaaagagagtgatattgcccttaatattgaagggagtgtgccccccccgtgatattgtttctaatatccaagaaatgaaaggatgatattactcccaatatcacaggggctgtacagccccctcccatgatattgttcccaacatcggggggggggtgaaatagtattattcccagtatcacaataggtgtacacacctgtcgtgatattgttcctaatacccatgggggaaaggacgatattattcttaatatctcagagggatgtacaccctccctgtgatattgttcctaatatccggggtgggagaggatgatattacccccaaaatctcaaagggtgtacacccctcttgtgatattgttcctaatatccagggtggagaggataatattattcccaatatccaggaaaggaaacgatgatgttactgtgaatattccagggggtgtcctcccctctgtgatattgttcctaatatccaggttggggagattatgatatttctccaaatatcacaaggggtgtacaccaaccctgtgttattgttcctaatatcgatggggggagaggacgatattactcccaatatcacagggggtgtacaccacctttatgatattgttcctaatatccatgaagaaagaggatgatattactttcaatatcgcaggggatgtacactccccctgtgatattgttagtaatacctaggagaagaaagtgtgatattactcccaatatcgcaggggatgtacacgcttcctgtgatattgttcctaatatttagggggaaaggggatgatattactcccaatatcgaatggtgtgtacacccccccgtgattctttttttttttttttttttttttttgagatggagtcttgctctgccgcccagactggcgtgcaatggcgcaatctcggctcactgcaacatttgcctcccaggttcgcacgattctcctgcctcagccttcggagtagctgggattataggcagctgtcaccataccaggctaatttttgtatttttagtagagttggggtttcaccatgttggtcaggctggtcttgaattcctgacctcaaataatccacccaccttggcctcccaaagtcctgggattacaggcataactttccctgtgatattcttcctaatattcaggaagaaagaggatgatattgctcccaatatcgcagagagtgtgcactcctcctgtgatatggttcttaatattcagaggaggagaggatgatattactttctatattgcagaaggtgtacacctccctcgtgatgtctttcctaatatccagtgggggagaggttattagtctcaaaatcacagaaggtgtaaacccccatttgatattgttcctaatattcaggggtggggagagaaaggtattactcctagtatttcagggcatgaacacccccaccgtgatatcattcctaatatccagaaggggaggcaatgatatttctcctaatatcacaaagggtgtacaccccttctgtgatattgtaaatattctgtgtgtacacccccctgtgttatagtctgtaatatccgggtgggggagagggtgatatttctccccatattgtaggggatgtacacccttctgtgatatggttcgttatatccagggaagaaaaaggtaatattgctgcccatattgtggagagtgtacacccccatgtaatatggttcgtaatatccaggagtggagagggtgatactgctccttacatcgaggaaggtgtacaccttattgttatatgattcgcaatatccaggggaggagagagtgatattgctccccatgtcgcagggggtgtaaaccctccgtgatatgattggtaatatccaggaaaggaaagggtgatatttctccccatatcgcgggggacgtacatcctcctgtgatatggttcgtaatatccaggaggaaagaggaaaatattgctcttcataacccgaggggtgtacaacccctgtgatatggttcgtaatacccagaagtgtacacccctctgtgatatggtttgtaatatccagggggttagagggtgatattgctccccatatcgcagtgggggtacacccccctggattggttcataatattcatggggggagaaatttacatttatcctcatatcagggggggtgtacaccccccgtgatatggttcgtaatatccaggggaagaaagggtgatattgctccttatatcgcggaaggatcaccctcccctgtgatatggttcataatacccagacgggaagagggtgatattgttcttcataaagcgaagggtgtacagccccctgtgatatggttcataatatgcaaaaggggagagggtgatattgctccccatatcacggagggtgtactcccttctttgatatggttcgtaatatccaggggtgtagatggtgatatagctcgccctattggggagggtgttcacccctctgtgatattgttcgtaatgtccagggaaagagaggatgatattactcccaatatcgcagaaggtttacaccactctgtgatattgttcataatatccagggaaggagaagacgatattactcccaatatggcagggggtgtagaactcctgtgatattgtttgtaatatccaggcaaggagaggatattactctcaatatcgcagaaggtttacacccctatgtgatactgttcatgatatccagggaaaaagaggatattactccctatatcacaaagggtgtacacccctttgtgatattttttgtaatatccaggggagagaggataatattactctcaatatcagaaggggtgaaaaccctcctgtgtcattgttcataatatttagggaaggagagagtgatattactccaaatatcacagtgggtgtacacccccctatgatattgttcctaatttccagaaggggagatatgatattattgccaatatcgcagaaggtgtacaccttactctgacattgtttgtaatatccagatggggaaatgatgatattactcctaatatcacagggggtgtacacccccttgttttattgtttgtaatattcaggggaagagacgattatattactcccaatatcgcagggtgtgtacaacactctatgatattgttcataatatccaggggaggagaggaagtgtacacccccccgtgatattgttcgtaatatccagaggtagagaggatgatattactcccaatattgcaggtggtgtacacctttctgtgatattgtcatgatattaagaaggggagaggatgatattactaacaatatcacaaaaactgtacactccctgtgatattgttcataatatccagaagaagggaggatgatattattctgaatctcgcagaagatatacaccaccctgtgatatggttcataatatcctaggggaaagaggatgacataactgtcaatatcgcagggggtgtacaattccctgtgatattgttcacaatattcagagggaaaaaggataatattactttcaatatcgcaggcggtgtacacattactgtgttattgtttataatatccggaatgagagaaaattttctcccaatatcacaggaggtgtacactcccctgtgatattgttcgtaatatccagggaggggagaggatactattactcccaacatctcagggagtgtaggccccccctttgatattgttcctaatattcggaagtggagaagatgatattacttccaaaatcgcagggggtgtacactccctctgtaatattgtttctaatattcatgagtggaaagaaagatattactcccagtattgcaggggacatacaccacactgtgatcttgttcacaatattcgggggggagaggatgatattactcccaatatcaaagtaggtgtacacccccttctgatattgatcgtaatatccagaattaaagatgataacgttactcccaatattgcagggggtgtacatttttgaatactgttcataatattaagagggggaggggatgatatctgtcccaatatcgcaaagtgtgtacacctcctgtgacattgtcccaaatatccagaggaaaaaaggatgttattactcttaatatctcagagagtgtacacctccctgtgatattgtttgtaacatccagaagaaagaggctgatattactcttaatatcgcagggggtgtacacccccgccccgggatattattcgtaatatccagggggaagtggaatgttcagaatgggagaggatgatattacttgcaatatcatagtgggtgtacaccccactgtgatattgtttgtaatatccgggaaaggagaaaatgacattcctccccatatggcaggggctgtacaccacctatcatattgttcaaaatatccagaaggggagaggatatgtctccaagtatcacagggggtgtacaccccgctgtaatattcttcctaatatccagggtgtgagaggataatagtactcccaatatcccagggcatgtacaccccccttgtgatgttgttcctaaaattcatggggagaaagaatattactcccaatatcacagggggtgtacatacactctgtaatattgttgccaatatgcagcaggagagaggatgatattactcccaatatcacaggggctgtacaccccgctgggatattgtttctaatatcaagggggaaaaaggatgatattactcccaatgtcgcagggtgtgtacttcctctttgtgacattgttcctaatatccaggagagaagagggtgacattccttccaaaactgaaaggggtgtacacaccctttgagatattgtctttaatatccagaacgaaacaggatgatataactcctaatactgcaggggggtacaccctctctgtgatactgtttctaatatccaggaggggaaagaaaaatattaatcccaatatcacagggggtgtacattccccctttaatattgttcctaatatccaggaagacacaggatgatactatttccagcagcacagggcatgtacacccctttgtgatattgttcctaatatccaggaaaagagaggatgatattactgtcaatattgcagggcgtatacactggttctgtgatattgtttctaatatccgggggtggagaaaatgatattactcccaatattccagcgggtgtacacccgttctatgatattgttcctaatatctgggggagagagaatgatattattgtcaatatcacaggggatgtacagattccctgtgatattgtttctaatattcacagggggagaagggtataatactcccgatatcgcagggggtgtacactccccctgtgaagttgttcctaatatccagggattgagagaatgatattactcccaatatcacaggcggtgtaaaccccctgtgtgatattgttcctaacatccagaggaaaagatgatgatattattttcaatatcacagggggtgtacgcatccctgtgatattgtttctaatatccaggggaggagaggatgatattattgttaatatcgcagggggtgtaccccaccctgtgatactgttcctaatatccggggtggaagaggataatattgctcccaatatcgcaaagggtgtacaaccttcctgagatattggtcctaatatccagggagggagaggatgatattactttcaatatcacagggagtttacacaacccctgcgatattgttcctaatatccagcggaagaagagttaggataatactattttcaaaattgctgggtctgtaccccctccccgtgatattgtttctaatatccaggaggggagaaagtaatatgactcccaatatcttagaagatgtacaccctccccataatattatttcttacatccagggggtagaggatgattttgctttcaatatcacagagggagtaaacctttccggtgatattgtttttaatatttaaaaagagagaagataaaattactcccaatacaaaggggatgtattgtgtactcccccctctgatattcttttttaatatccagatggagagaggatgatattactttcaatattgcatgggatgtataaatcccctgtgttattgttctgaatatacaggtggggagagtatgatattactccaaatatcgcagggggttctttccccctgtgatattgttcctaacattcagggagggagaggatgatattactcttaatattgcagggggtgtacccacgcctatgatattgttcctaatatccagagggggagaggatgatctaactcagaatatgacaaggggtgtacacacagcctgtgatatggttcctaatatacaggggagaaggggataatatttctcccaatatcgcagggggtgtacaaccccctgtgatactgttcctaatatacagaaggggacagcatgatattgttcctaatatcgcaggaggtgtacaacgccctgtgatattgttcctaatatccagggcgggagaggatgatattaccctcaatatcgcagggggtgtgcactttccctgttatattgttcctatgatccgggtggggggaaatgacattagtcccaatatcgcaggatgtgtgcaccgctcccccgtgatattgttcctaatatcaagggggagagaggaggatattactcccaatatcgcaagggatgtacatcctccatgcgatattgttcgtaatattcaggaggagagaggatgatattactcttaatatcgcagaaagtggacacccaccctgtgatgttcttcataatatccagggaagcagacgattatatgactttcaatatcgctgggagtgtacatcccttttgggatattgtttctaatatccaggaagggagaggattatattactctcagtattgcaggcagtgtacaccttttttgtgatattgttcctaatattcagaaagggaaaggatgatattactcccaatattgcaggtggtgtatatccccctctgatattgttccttatatcaaggaagagaaagaataatattactcccaatatcaaagacagtgtagacccctcctgtgatattgtatttaatatccatggggaaagaggatgatgttactcccaatatcgcagggggtttacacccacactgtgatattattcctaaaatccagtggaggagaaaataatattgctcccaatattgcagggtgtatacaggccctcccccgttatattgctcctaatatccagcggtggagaggatattactttcaatttgtgtagggagtgtatacccccctgtgatatttttctaatatcaaggatgggaaaggatgacattactcccaatatcgcaggaggtgtacacgccctgtgatattgttcctaatatctagggaaggagaggatgatattactttcaatattgcaggagctgtacaccctctgtggtattgttcttaatatttaggttgggagaaaatgatatgagtccaaatatcgcagaaggcatacacacttccaataacattgttcttaatatccgggggagagggtgatattactcccaaaatctctggggggtgtacacccccttctgatatttttcctaatatccagggaaggaaacgatgatattactataaatattccaaggagtgtacaccttcctaatatcctaatattgttcctaatatccaggggtgggagaggattatattactcccgatatcgcagtgggtgtacacccctcctgtgatattgtttctaatatccaagctaggagaaaatgatatcactctcaataccacagggggtgtacaccttccgcatcatattgttcctaatattcagagggaaagaagatgaagttactttcaatatcggaggggttgtacacaacccctgtgatattgctgctagtatccaggaagaaaggggattatgttactccccttatagcagggggtatacacctcccctgtaatattgttcctaatatcaaggctgggatatacgtggggggaaggatgatattactcccaatatcgcaggggttatacaaccttctgtgatattgctcctagtaaccagggcagaagaagatgatattactcctaatatcgcaggaggtgtacactcccccattatgttgttcccaatatgcagaaaaggagaggatgacattattgccagtatcgcagggtgtgtacaccacccctgtaatattgttccaaatatttagggggagagaggatgatattactcccaacatcgcagggggtgtacacacatcccctgtaatatagttcttaaaatctaggggaaaaggggatcttatttctctaaatattgcagagggtgtacactccccggtgatattgttcctaatagccgggagggagataattaaattactttcaatatctcagagagtgtacatcgcccttgcgatattgttcctaatatccagagcaaaagagaatgatattactcccaatatcttaggagtgtacatttaacctgtaatattgttcctaatatccagggggaagagaatagtattactgccaatatcgtaggggttgtacaccttttctgtgatattgttgcaaatatttagtagagggaaagaatattactcgcaatatcacagggaatgtatacttcccctgtgatattgttctgatatccagaaaaagagagggtaatattactcccaatattgcagggggtgtacaccccccttgtgatattgatcctaatataaaggaaggaagaggatattactcctcatatagaaggggttgtccaccccccttgtgatattattcctaatattcagggaagcagaggatgatattattttcaatatcacagagggtgtgcagtccacctgtgatattgttcttaatattcggggggagaggatgttattatgcctgatatcgcagtagaggtacacccctcaagtgatactgttcctaataaccaggggtgaagaggatgatattactcccaatatcgcaggtggtgtacacccccccatgatggtttctaatatacagagggggagaggaaaatattactcccaaaatcgctggaggtctacaccccccttgtgatattgttcctaatatccaggaaaggaaacgatgatattactgtgaatattccagggggtgtacacccgctttgtaatattgttcctcatatccagggtgtggagaggattatattactcccagtatcgcagggggtgcacgacgcccctgtgatattgtttttcatatccaggaggggagattattatcaatatggcaaggggtgaacaccccctgtgatattgtacttaatagttaggttggcagaaaatgatattagtctcgatatcgcagggggtgtgcactccgcctggtgatattgcttttaatatcaagggggagaaaatggcattactcccaatatcgcagggggtgtacaccgctcatgtgatattgttcctaatatccaggtggagagaacataatattactcccaatatcgcacaaggtgtacacccctcctgtgatatggttcctaatatccatgggaggagatgatgatattactcccaatatcacaggggatgtacaccacccttgtgatattgttcctaatatccagggaagaaaacgatgatattattgtgaatattacagggagtgtacacactccctgtgatattgtttttgatatacagggtgggagaggatgatattactcccaatatcacataaggtgtacaccccccgtgatattgttctaaatatttcggtggggagaaaatgatattagtctccatatcacagggggtgtgtgctcctcaggtgatattgtttttaatatcaagagggggaggagattatattactttcattatcacagggggtgtacacccctcctgtgatattgttccttatatccaggcgaggggaaaataatattactctcaatatcgcaggaggtgtacacaccccatgtgatattgttcctaatattaagggggaaagaagataatattactttcaatatcacagggtttgtactcctttcttgtgatatagtttttagtatccagggggaaagagcatgatattactcccattgtagcaaggggtgtacacacctcctgtgatattgttcctaatatccagaagtggtgaggatgatattactcccaatatcgcagggggtatacaccccacctatgatattatttctaatatccatgggaaaagagtatgatattacacccaatgtcgcagagggtgtgtatttttcctgtgatattgtttctaatattcaggcggggagaagatgatattactctcaatatagcagaaattgtacatccccgctgtgatattcttcataataatcagggaaaaagaggatgatattactaccaatattgcaggggggttacacttcccctatggtagtgttcctaatatccaggaagaaagaggatgatattaatcccattatccaggaagtgtacacccaccctgtcatgttgttcctaatatccagcagggaagaggatgatattacaccccccccccgtgatattctccttaatatccaggaggggagaggctgatattactggatatatagcaggggtgttcataccttctgtgatattgttcctaatatccagaaaaggagaggatgatattacttccaatatcgcagaaggtgtacacctccctgtgatattgatcctgacattcagaaggggagaggatgatattactcaaaataccgcagggcatgtgcattcccttgtgatattgttcctaatacccagaagggaacaggataatattactttcaatatcgcagggagtgcacacccccctttggtatggttcttaatatccagaaggaaagagggtgctattactttccatattgcaaggggtgtacaccccactgtggtatggttcataatatccaggcagggagagggtgctattactccccacagtgcggggcatgtacaccctgctgcggtacggttcctaatatccagggggagagaggatgctatgactccctatatcgcggggtgtgtacacccctgtgtggtatgttttgtattctccaggaacggagagggtgttgttacccctcatatcgctggaaatgtacactcccctgtggtatggttcgtaatatccaggggattgagggtactgttacccccatactccccatatcgtggggggagtgcacctccctgtggtatggttcgaaatatccagggtaagagagggtgctattattccccattttgcaggaggcgtacacccccctatggtatggttcgtaatatccggggtgaggggatgctatcaaaagaagagagaaagagaccccccatattgttctatattattttatactcagtacctgttttaagaagaaacaaggaagtgaaaccaaaagcaggcagcccggcgccaggcaccagacccaaaaccagacccgaaaccaggcctgggcctgcctgaccttagcctgatagttaaaattcaacccatgacctagcaaccaatgttatccatagattccagacattgtatggaaggacattgtgaaatttcttgttctgtgctgtttcactctgattaccggtgcctgcagcccctgtcacatacccactagattgctcaatcaatcatggccctttcatgtaagatctttagtgttgtgagcccttaaaaaggacagaaattgtgcactcaacaagctcggattttgagacgctagtctttcgatgcttccagctgattaaaagccacttccttcactacctcggtgtctgtggggttttgtccgcgactcctcctgctacactatgactccccatatcaaggggggtgtacacccccctgtggttcgtaatatccagcaggggaaaaggtgctattactccccatattgcagggagtgtacacccccttgtagtatggatcgtaaaatcaaggggggagggaaggtgtaattatccccatatctcagggggtgtacacccctttgtggtaaagtttgtaatatccagggatattacagggatattatccccaaattaatacttttataatttcttatgcctgcctttactgcaatctctgaacataaattgtgaagatttcatggacatttatcacttccccaatcaatacttttataatttcctatgcctgtctttactttaatctcttaatctcatcatctttgtgagctgaggatgtatgtcgcctcaggaccctgtgatgattgcattaactccacaaattgtttataaaacatgtgtatttgaacaatatgaaatctgggcaccctgaaaaagaacaggataagagcgatgttcagcgaacaagggagataagcataaggtctgactgcctgtggggctgggcagaacagagtcacatttttcttattgcagaaaatgagtaggagaaatatcactgggaagggaacgcattcctaggggaggcctatggacggccgctctgggggtgtatcccttatgtggttgaagataagggatgaaatacaccctggtcccctgcagtgccctcaggcttgctaggattagaaattccagcctggcgaattctagtcagaccagttctctgctcttgaaccccgtttcctgttaagatgtttatcaatgacaatgcgtgcacagcaggacatggaacctcaatagtaattccattttctccctggccttgtgaccttgctaggcccttctgcccttgtgatcttttattgccatttgaagcatgtgatctctgtgacccactccctattcgtatccccctccccttttgaagtccctaataaaaacttgctggttttgcagatcaggtggtcatcacagaacctgccgatatgtgatgtcaccccggaggctcagctgtaaaatttctctttcgtactctttcactttatttctcagaccaggtgacacttaaggaaaatagaaaagaacctactttgaaatattgggggctagttcccccaatagacattgttcctaatatccagaaaaaaagaagatgatattactcccaatatcacaggggttgtgaaccccacctgtgatatggttcctaatatccaggaagggagagaatgatattactctccatattgcagggggtgtgcacatccctgtgatattgttcctaatatccaggggaggagagggtgatattactcccaatattgcaagggttgtaaactccaccctgtaatattgctcctaatatttaggatttagggggggagaggataatattactcccaatatcgcaggggatgtatatgccctctttgatattgttcctaatatccagggggggagaggataatattactttccatatcacaaagagtgttcacccccctgtgatattgttcctaatatccaaaaaggaagaggatgatatcaatcccaatatcacaggaagtgtacaccccccccttttatattgtttctaatatccaggggaaatgagggtgatatttctctcaatatagcagaatgggtacactccccctgggatattattcctaatatccaggggaaaaaaagaggttgatattcttcccagtatagcagggaatgaatacaccctttgtgatattgcttctaatatcaaggggaaaagaggatgatatgactcccaatatcacaggggatgtaaacctgtggcgttgttgctaatatcaaggagggaagagtatgatattactcctaatgtcgccgaaggtgcacactttccctgtgatattgttcctaatatccaaaagggaagagaatgatattacccccagtattgcagggtgtacaccacccctgtgatattgctcctaatacccaggaaaaaagagaatgctattacccccaatatctaaggggacgtataccttccctgtgatattgtttctaatatccaagtggggagaggatggttttactctcaatattgcagggagtgtacactccccctgtgatactgtttctaatactcgggctgggagaaatagtattactcccaatatcgcagtgatattgtttccctgtgatattgtttctaatatctagtgggggagataattatattactaccccatacacaggggagggtgtacattcccctgtgatattgtttgtaatatccagggaaggagaggatgttactcccaatatcacaggggttgtacaccccttttttgatattgttcctaatatctggggggcagagaattatattactgtcaatatcacagagtgtgtacaccccctctgttatattactctttatattcagggcggtagaggatgatattactccctatatcacagggggtgttcacccctcctgtgatattgtttataatatctaaggggaaagaggatgatatcactctcaatatcaaaggaaatgtacacctttcctgtgatattgtttttattatataggggggcagaggatgatattaagaacaataccacaggggatgtacacccacgtattgatattgtccctaatatgtatggggaaagaggacagtgtaactcccgatatcgcagagtgtgtacacccccttgtgatattgtttctgatatacacggggagaaaagataatatttcttccaaaattgcagggggtgtacaaccccctgtgatattgtttttaatatccagtgggggagagaatattactcccaatattgcagggcgtgtacacaacccctgtgatattgttcctaatatccagagtaggggaggatgacattactttcaatatcgcaaggggtgtacattcccctgtgatattgctcctaatatccatgaggggagaggatgatattattcctaatatggcaggggctgtacaccttccctgtgatattgtttctaacatccagtgggggagaaaatgatattactccctatatcacagaaggtgtacactttccctgtgatattgttcctaatatccagaaggggagaggataatattactcccaatatcgcaggaagcttacaactcccctgtgatattgtttctaatatccagggaggtagggatgatattactcccaatatcgcaggggatgtacactcccccgtgacattgtttctaataaccagggggtgagaggatgatattacgcttaataccgaagggggtgtacacacccttgtgatattgtgcctaatagccagggggaagaaaattatattaattttaatatttatggggaaaaaggatgatattactcccaatatcacaggggctgtacaccgaccttttgatattgtttttaatatccagaagagaagaggataatattgctcccaatatcagaaaaggtgtaaaccccttctgtgatattggtcctaatatccagggagggagagaataatattactaccaatatcacagaaggtgcccacccccaaggtgatattgctcctaatatccaaagataatagggtgatgttactcccaatatcacaggaggtgttcacaccccttgtgatattgtttctaacgtacagggaagggagaggatgatattattcccaatatcacaggaggtgtatactcctctgtgatattgattttaatattcggggggaaaggatgatattactccctatatcgcagagggtgtacaccctctgtaatattgatcctaatatccagggcgggataggatgatattactcccaatatcgcagaaagtctacacaacccccagtaatattgtttttactatccagggggaagaggatgacattactcccaatttcacagagtgtgtacactcaccatttgatattgtttctaatatctagggggagagaatatattactcccaatatcacaggaattgtacaccacctctgtgacattcttgtgaatatccggggaaaaagagaataatattactcccaatattgcagagcgtgtacacccctccatgatatcgatactaatatttttttaaagaggatgatattactcccattgtcacaggatgtgtacaccccccttgtgaaattgttcataatattctggggggagagcataatattactccccatatcgaaaaaggtgtccaccctccttataatatggttcctaatatccaggatattacttaatccaggatacttgtaataccctaaatatacaattgcttgaacctccacctcccaggttcaagcaattcttctgcctcagcctcccgagtagctgggactacaggggcacaccaccacacccagctaatttttttttcttgtatttttagtagagatggggttttgccatattggccaggctggtctcaaactcctgaccttgtgatctgcccacctcagcctcccaaagtgctgggattataggcgtgacccaccgtgccaagccaggaagaggatgctctatagatttccccaataagagatggctttgcagggccattccaaaatatgtcaaagaaatacatttggggataaaatactttgatttcctttagggaatgttatctattatgtgatgctataccagagtcaggttggagtcggttatcttattgcaacaaagagtctgttccgtcactgttgggatctctattttttcctcttatttcttgagacagggtctcactctgtcacccagtctggagtgcagtggtgcgatcttcattcactgaaacctctgcctcctgtgttcaggtgattctcgtgcctcagccccttaagtaactaggattacaggtgtgcgccaccacacccagctaatttttgtattttcagtagagatggtattttgccctgttggccaggctggtcttgaactcctggcctcgtgtcatctgcccacctcgacctcccaaagtgctgggactgcaaatgtgagctattgtgcccagccaggatctctgttttaatgttagtgctggtcactttgcatgaactccaaagggaagaaatataatgaggtgtgtctgaccccctgccttctcatcgtgacctgaattagtttttcaggtttgcaggggatacccttggacaagaaggggctctattcggttggttggggggattagaattttactttttgtttacaatatttctcctgaaagagttaggggctcacaaggaatttccgcgtgagcaacttatgaggaaagccatctgggaagatatgtgtccttgtgtcactgggatattctcgtttaccccaatgatacggcaatgacgcagggttgtgaaattacagctatgtgtttggggaaaaaagaaagcaggattgtgtgactacgtttccaaacttcacttgcccttagccatagtgagttgggggcctggagattctgttttctttcacaatgatatagatacaattaaatgtatagaaagcaaaaaaataaaaaggtgagtaatgaggaacctctgattcctgagtggccatgtagttacccatggcacagagccacagttactgaaggtaaagtttgctggggaatttagaaatgaatccagctcttggaggagtcagtttactggatgcctaagaaaatgcaaacaaaataagaaaaaagggtaatattcaatcccatagttattgttacctgtcatagctaaagtaaaattaaaacagagtgctggcttcaatcttgatgctacactaagcttagatttcagtgaatgtgagtctcagccactagctcagagccacctcccaaagaccaaatcatgtagggacaatagaaagtacttctgagaattgtggttaccaagaacctagtaactgttggggaggagcaaaacaaagtacagaaaccagagggtacaatctgagtgagactgctatcagcttctggaggagcctttactaaaatgaatgatgagagtaactggatgatgagagtaactaatggatgatgagagtaagcaatgtctttggttttcttttttttttttttttttttttagcagacgtctcactcttgtcgcccaggctggagtgtaatggcatgatctcgcctcactgcaacctccacctcctgggttcaagcaattctcctgtctcagcctcccgagtagctgggactacaggcactcatcaccacacctggctaatttttgtatttttagtattttctggtgagggtccaggtttccggaaacaactcagagacatatgttaagatgttatctttagttttcacagggaaccaaatatgttacgactccaatttccttggctattgttttaagttaccattaccttctcgttgatcaagttgctcatttacttctcaagcctagctagatgcctggaatttcccttgaaggaagtcaagattttcctttatctccatactggctgatggtgatcgagtaagcccctaagaggggtccctgctccatctcgagatgctgctagattctacagtgcctaataaacagctctcgcctggccgacaaagagctgcttgctctctggatagcaattccaaagtgaacagacaacatcctgtttggaagactgccactctgttagaagaagcatcaggaaaacctttcttttgagctatttataactaacagcaattgaccaagtatacttttgtgagtgaaactgacctttctccctgtaagaattctccaaaatttggaaactatttgtgagtatttttacttatggcaatataattattggcacaagctcaatcagattcggttttctttcgtaacaggaaccattggagatactcattactctttgaaggcttacagtggaatgaattcaaatacgacttatttgaggaattgaagttgactttatggagctgataagaatcttcttggagaaaaaaagactgggtatattttcaatatgctttccttttaaggtccctcacctgtggaaagtaaagaatgtcactttctgacaggctcaggaacctcaagttatgtagggatctcaagaagatgggggaattcacccagttcatacaggtgaaattgctgttgcaaagattatgaatatgagagaagtccagcatggctgacttcatctcgtgtctggcctcaggctggctgcccttgctcactcttgggcataggccaagctagccatgggaggaatttagtttatagtttaactttgaagcacggatgataatagtctctccctaaaatgaaccccttccttgctcagggactgaaactacctttgtatgacaaatgaaagcccacaagattaagattatgagaggggcctgaattctgctaaaatgcaggtgtagctgactgataacaagtcattgtcccacagcttgcctttctataatctcttgcttctcaggagtcacatggccagaggtcctgagatttccagtcctgtgacccccacccagagatggacttagtgcatgaggaccattttccacacccctatgatttcatcctcaaacaatcagcagcaaccattccctagccccctgccttccaaattatccataaaaatcctagcctctgagttattagggagattgattaataatcccagtcctaccccttgggttgctctgatttaattaaaccttctctactgcaataccacggactcagtaaattggttttgtctgtgcaatgggcaagaagaacatgttgcatggttatacaggtactacaagcacagtctgatggcaaattattggttttgcttcctgcccttgatgtttctaaacatctagtccaaaattacttgtgaaaggtccagcaaagccaattttaaaagaggctatatggccaatcactattctttctacacattattgcaaataatcaggccacggctgggcacggtggctcatgcctgcaatcccagcactttgggaggctgaggcaggatcacctgaaatcaggagttcaagaccagcctaggcaacatgataaaaccctgtctctactaaaaatacaaaattagccaggcatggtggcatgcacctgtaatcccagctacttgggagactgagggaggagaatcacttgaacctgggaggcagagattgcagtgagctgagatcacaccactgcactccagcctgggcaatagagtgagactttgtctcaaataataataataataatcagaccaagtataatgaaattaaaatttattttgcaaataaattggtcctactacaatttatccttcatagaaatgtggaaactgaagataaaaaaaattaggtttcagaagaaaactatactacacctgttattagattctagccctaaacattgtttttgaggtttttattatttacctgcaatttggtctaaattctgaattatttcctgactacaagtatccaaggaataaatgggttttctttttctttatgatagttttagttggcttctaatgcaacaacaatttttattgtaatcctgtgtgcattctattcctactattcaaattattaatgttatagatctttcattgtagtacttctgaattaaccaaaatcacagtattctgaagatgattctacaaagcctgctgtttctacaaaggctgctgatgatttctacaaagcctgctgtagtgttgctgtggcctctgcttaaaaaagtagaaaacacattgatgcagcatgttcaccccaacctccctgcctaaaggctcagggaccatcttggaagaggaaggcgcgtgagattgtaagagccgaattagggggatggagtgtggagaataaggacacttcatcttggatgctcacctgccaaattgacttctgatgaaagccagctccagaaatgtgcctacagttactactttcacctaaaccctgcccttagtcaaatccttctcttcttctaagcaatcaacttcaattccttgtataacccacagtataaaagggcttttataccattctatcctattgcatgtaagccttgggtctgggaggtaacagtgtgggattccaccatctcatctccctgccacccaaacatgcctgctcttctttaagcaatattaaatgtttgtacttcagaaatttgatttgtcagcctcttcttcagactctcagcttctttggcctttgggagtaaatttgcataggcctgctcaaaacaggatgttctgggggtttgggggtgttgttttgttttgttttttgttttgtttagagacagggtctcactctgtcacccaggttggagtgcagtggtgcaatcatggcacactgcagcctcaaactcctaggctcaagcaatccccccaccttggcctcccaaagttctgggattacaagcataagccaccatgcccagccctggacttttctttaaagacatttacacagtgtaggaattactgtgggtgcactgctcaggtccccttctccaggatgctcattcctacctcatagatgattttcctgcagagatttgacctcagctgaagggcagtcacctggtccaggtggttgctattcacctccttcctgagaacagccaacagccagggacacgctagcacagagatataagagcgaccaaggtgaggccccttctgtgctgcggtgcatgctccagagcctccctgggatcagacttaagagggtctccagccagatctggtcttcgctgctttcctcgagctccccagcgcactcctgcaatgcatcttttttttttttttttttttttttgagacggagtttcactcttgttgcccaggctggaatgcaatggcgcaatctcagctcaccacaacctctgcctcgcgggttcaagtgattctccttcctcagcctcccaagtacctgggattacaggcatgcaccaccacgcccagctaattttgtatttttagtagaaacgggtttctccatgttggtcaggctggtttcgaactcctgacctcagttgatcctcctgcctcagccttccaaagtgctgggattacaggtgtgagccactgtgcctggcccaatgcacctcttgaatcacctcctcatgctttgcttttagagaacatgatccccaacatgtgattccagcaaagattctagaaagccaaccgtgacaatcacttctgggtttagatgacccccccccaccacaagatggcagtgagcacctcatcacagaggtgctgatggtctgcagcaccgcgccaggccagaacgtgccttttacagaagaaaataacccagtagctgactaggatggtgaggagggctggtgagcactgcggtagtgagagggacactagcatcactgagatgcaagtgatggtcatttttcataggtcaaagctcaaagcaggggacagttacagggcagggcttcatagcaccagtgtgatgaaagtatctgggagtggctaaggccagcactatgccatgggaagcaaggtgggcctgaggaggaggcagcagcgtcagcctgcaacaagtgggggctgccctgcagagacctaagagtcatgttatagagcacagtgtctgtaaggccaagaagtgtggacagccaagtgtgtcaattactagacatactcaagaggagcaggaagggcagggcatggtggctcatgcctgtaatcccagctacttgggagactgaggaaggagaatcgcttgaacccgggaggtgaaaattgcaatgagccgagatttcgccactgcactccagcctgtgtgatgggagcgggactccatctcaaaacaaaaaaagaaaaaggaaaaagaaaaaaagaaaaacctaggtatacttctcaagcaaataaaaataatcaaaaccaatatcatgcccgggcacaaatttcatatatataacagatttaaatatatgagggtgattatcctctcatatctccatttttttttgtttttccatttttttctttactaaaaaaagttaatgccaatgacacacaatttttttttttttttttttttttgagatggagtctcacttcttcgccctggctggagtgcaatggcgtgatctcgactcactgcaaagtctgcctcctgggttcaagcaattctcctgcctcagcctcccaagtagctgggaccacaggagtgagccaccacacccagctaatttttgtatttttaatagagacggggtttcaccatattggccaggctggtctcaaactcctgatctcaaataatctgcccgcctcggcctcccaagattctgggattataggcgttgagccactgcgccccgcctatgtatgattttttttttaattttattttcataagtttttggggaacaggtggtattttgttacatgagtaatttctttagttgtgatttgtgagattttggttcacccatcaactgagaagtatacactgaacccaatttgtggtcttttatccctcacccccttcccaccctttcccccggagtccctgaagtccattgtatcattcttatgcctttgcatcttcatagcttagctcttgaacccttactttctgtttgagggagaagacatatcatctacaagtagatactgtgtaaacattccattgcatgactatcccataacttatttattatttgtgtttggttatttgctgctatgtaacaaccccactcccaactaaatggtgtgacaattccatgattctgtggatcaaaaattctgaaaagtcaaacccaaggagttttgtctctgctccatgatgctaaagcctccgcaggggtgaggcgaatggctcagggtgactgaaaagctcagggttggaacagctggggatgaggcctctatgtataagatgattcttcactcacaggtctgaaactatggtggggacagccagaaggctcggctcagctgggacagtcacctgagccctacacatgacctctccaacatggtgatcctgaagcagttgggtttcttacacagcatcacacttttcttttttttttttttttttgagatgaaatattgctctatcacccaggctggagtgcagtggcacgatctcagctcactgcagcctccgcctaccaggttcaagcgattctcctgctccagcctcccaagttgctgggattgcaggcgcctgccaccaagcccagctaatttttgtatttttagtagagacggggtttcaccttgttggccaggctagtcttgacctcttgacctcaggcgatccgcctgcctcggcctcccaaagtgctgggattacaggcatgagccaccgcgcccggccaaagctcacacttcttatgattcagccttagatgtcacatcagttcattttccccacacttattagtgttagaagtcacaagcccacccatactcaggggactggcacacagaccccactctcaatggaaggggtgggacaccaccattcctgctgatgggcatttgggtaacttcctgtttgaagctattaagattgggctgctgtggccgggcgcagtggctcacgcctctaatcccagcactttgggaggccgaggcgggcggatcacgaagtcaggagatcgagaccatcctggctaacacggtgaaaccccgtctttactaaaaataccaaaaaaaaaaaaaattagctgggcatggtagcgggcgcctgtagtcccagctactcgggaggctgaggcaggagaacggcgtgaacccgggaggcggagcttgcagtgagccgagattgtgccactgcactccagcctaggcgacagagcaagactccgtctccaaaaaaaaaaaaaaagattgggctgctgtgactattctagtaggtgtctttggtgagcgcctacacgtgtttctctttttctctttagtatatgcccaggaggggaactgctggctcccagataccgtatgttcagggtcacacacacttccacagggttttccaaagcccttgtaccagcacgcactcccagcacctgtgtgactgctccagctgtcccacagtctcatcagttctattgctgatattttcattttagcttaagttatatttaataggaaaattaccgttgcctctgccccccgttcctgcctgtaggagtttctcgtagctgttgctacaggtggccacaaatctgtcacttaaacccacacaaattgatgtccttatggctttggagtcagaagtgtcaactgaaggtactagcagggctgtactgacctggtggcctcagggagcatctgtgctgcttctccaccttctagaggctgctgcatccctcgctccagccccttcctgacaccactcaccctcctacttctgttatcacatcctcaccttctctgtgttcagggctccctctgtctctctcttgcaagcacacttgggattccattgagggccacccacataacccaggagaatttctccacctcaatatccttaacaactgcagagcccttttgccataaaagttaccattcacgggttccagggattgtgacatgggtagctttaggagtgattattcctgcctgtctcccgctcaccagaacttggactttctctctcaacaggagccccctgtgtgggaatagcctgtctcaacgacgccctctataaggacctgcttcctcaaaggacctcatagtcgggtcctgcccctcagtgtccagtctgccttggctggaggggctgcaggggtgtgttggcgccacctggtggagacagggcatcacagcaggtgggagcccagtagaagcacaaccaaaacatgggtaatgtttaaaattttctggctaagcgctgtggctcacgcctgtaattccagcactttgggaggccgaggtgggtggatcacatgaggacgggagtttgagaccagcctggccaacatggtgaaacatcccctctactaaaaaatacagaaaaattagctggacatgtggcgcgctcctgtaatcccagctactcgagaggctgagacacgagaatcgcttcaaccccggaggggttgccgagatcgcgccactgcactccaggctgggcgatagagcgagactctgtctcaaaaaaaaaaaaagaagaggggaggcgaggggaggggaggggaaaagggggaatttgtttggagctgagacatccatcttctcctgacctcagatatttgcactcctggttatgaagccttcacacttggactgaatacaccaccagctttcccgatttccagcgtgcaaatggcagatcgtgagacttctcagcttccataattacatgagccaatttatatatataaattgggtcctccagaaaaacagaataaattatatatataattatacgcataacttaattaaattatacgtataacttagctatatatataatttattctgtttttctgaagaaccctactgacacaaatgttgagcatcttttcatgtgcttattggcttaataacttgtacatcttctttggggaaatgtctattcaagttctttgcccattttgtaactgaactattaatatttgtctttacattgttgagttgtaaaagttccttatatattctagatactagagccttatcagatatatttctgcaactattttctcctaatatataggttgtgtttttattttctttttctttttttttttattgagacagtctcactctgtcacccaggctggagtgcagtggcatgatcttggctcactgcagactcgacctgccaggctcaagcaattctcccacttcagcctcctgagtagctgaggttataggcacttgccatcgcacccagctaatttttgtattttttagtagagccgaggtttcgccatgttgcctaggttggtcttgaactccctgcctcaaagcgatctgtcagcctcagtctccctaagtgctggaagtacaggtgtgagccacagtgcccggccatctattttcaatagtgttttttgatgtacacaggtttggaattttgataatgttcaattcatccatttttttttttttttttttggttctttctactggaccaccactcttgagccctctaatccaacctccacgcggcagccagagggagctctctaaatgtaattactctttccctgctccacctgctcaaaacagtgtcacatttgtgatttaaaacagtatttctcaaacctaatttgcaaacaaagcaggtggaactcttcttgtatgcacagcatctgatttggttggtctggcatgggtctgggagtgagcacacctaccaagcggctgctggggtaacttgcgttttccactgatgatttcagcaatgtttccggtcccacatgctcctccagaaccttgtactcccccatgaaaaggtggagtccatttccccttcctttatttatttttttgagacgaagtttcactcttgttgcccaggctggagcgcaatggcgtgatctcagctcaccgcaacctccgcctcctgggttcaagcaatgcttctacctcagcctcccgagtagctgggattacaggtatgtgccaccacgcccagctaattttgtatttttagtagagacggggtttctccatgtcggccaggctggtctcaaactcccgacctcaggtgatccgcccgcctcagcctcccaaagtgctgggattacaggcgggagccaccgcgcccggctatttccccttcctttgaacctgatcaggacttgacgatggcatcaacatggtgagagtgaccctgcatggcttatgaggctgggttacacaaggcgatgttgcttctgactggctccctctcaggatacatgcccttggaacccatcctctaagctccttgggagcccaacttagcccatgtggagacaagacagggagagaaacagaggcacccccagccctcagccagcatcaaccgccagacaggagagcaaatgcgccaacaatgattccagctgaagcctcagacagcgtggagcagagatgagggatccctgcagattgcagatgcgtgagcaaaatgcatgctgtcactgttttgaaacaacaatgtctgggggctgtttgttatgcagcaatagacagctgtaacaatgctgttactgctgtattccatgaatgactgcactttgagtagcagggggctagatcactagataagccccatggcttctgtgtatgctatttttctacttttatatccttttcattcactttttttttttttttttttgagacagagtctcactctgttgcccaggtgggagtgcagtggtgcaatcttggcggactgcaacctccacttcccgggttcaagcaattattgtgcctcagcctcctgagtagctgcgactatagatgcacccccatgcctggctagtttccgtatttttagtagagacggggttttgccatgttggccaggctgatctcagactcctgacctcaggtgatccacccaccttggcctcccaaagtgctgggattacaggcgtgaaccactgcacccagcctcattcactttctttacttggctcatttttccttgttgcctcaattctcctctaagatcactttcctgacatttcagcctgggcctgttgccttctctgggtcccctccgcctcctgtgcctcccccatctcagccttgatccctcagattatacttcctctgtccccaccctgaccatcttggctgtccctggatagggatgggtatcttctcccactggtctgggagatctggaaggacaggcctggaaaagacttggtcactgctggaaggagctcagttagtgtggtgctgaggacagtacgggtgaggctggccccttcacccaaactcccactctcttccatagatttcacctctgtggcccaggccataggattagggcaactccccttaaacatcgagtccatcctccaagctgtccttttttttttttttttttttttttttgagacagagtctcgctctgttgcccaggctggagtgcagtggcgcgatctcggctcactgcaagctccacctccagggttcactccattctcctgcctcagcctcccgagtagctgggactacaggagcctgccaccacacccggctaattttttgtatttttagttgagacggggtttcaccgtgttagtcaggatggtctcgatctcctgacctcgtgatccgcccgcctcggcctcccaaagtgctgggattacaggcgtgagccatcgcgcccggcctcatgctgttcttgaatagtgagcacctgttacaagtcgccccaccagcctctcacttgtacccccctcatctctttctccccaagagacagaggaccctggcacttgtgaagcatgacccagaccctggggccatggcatccaacatcctcattccccatgacccctactgtctagatgtagctgccaagagacccccagactccccgggcctctgtctagagtgccaagacagagagagaatgccctgccgcttgcatgctttgtggggtgtccttcccccttccctggctgctaggcgtgacttcaacgttctccccaacccccaaacagcagcactgacaccagctgcagacctggctcaggttagctaatgaggaccaggctggggatggagcctgaacccctaaaccccagtcctgtaccccaccctaatcctggggtctccactggacaaaacgaagcagcttggtttttcgttgttattgtttttgagatagagtatctctctgtctcccaggttggagtgcagtggcgtgatctcagctcactgcagcctccgcctcccgggttcaagtgattcttgtgccgcagcctccccagtagctgggattacaggcgcgtgccaccacacccagctaatttttgtatttttagtagagacagggtttcaccatgttggccaggctggtctgaaactcctgacctcaagtgatttcccagcctcggcctcccaaagtggaagcggcttatttttaaggagaaaactcccgtggaaaggaatcagcacctcctctgtcaacatttcacttctctgaaaagactctcacttccaacagaaagtgctttgtaacacaacaatgaggctgggcgaggtggctcatgcctgtaatcccagcactttgggaagctgaggcgagtggatcacgaggtcagaagttcgagaccagcctgaccaatatggtgaaaccccgtctctactaaaaatacaaaaattagttccgtgtggtggcgtgagcctgtaatcccagctactcaggaggctgaggcaggagaatggcttgaacccaggagatggaggttgcaatgagccgagatcacgccactgcactccagcctgggcaacagagtgagactccgtctcaaaaaaaaaaaaaaaagaatgagaacatatggacacagggaggggaacaatacacacaaacaaaatttagaaacaggtgaaaataattttagtaatatttttactaatactgatatgctcaaaatattattatttcaataagtaatctaaaaattattgagatgtcttatgttcttttcatcatactaagcctttaatatttggtgtgtattttacactcacagcacatctcaatttgcagtccccatgtttcaagcactaaataaccatgtgtgtccggtggctaccatactggacagcgttgatctgaaatcgcatctgtatgcatcaccagcatatttgcagagatccccatctcagcagcacacctgaggctcatctgcgaaagcacctgcaacttctctacaacctcccacatcacctccaaacacatcctcatgtcatctgcaaacacacccatagctcacaggccaatgcctaaatatcattgcaggcaccttcagagaaagcacttactaaaggggtatacttgattccacatctgctttgacctgcaaatctcccttctcctttacatacatttgcatctcatttgtatgtcaatctaaatccactggcagagcctcagatcatcatctcaaagtcaggtggatgtggggctgggcaggcctccaggtgttcctcctcctgcttcctctggggctcttgatcctcctcctcttccttgctgctctcctcctcctcctccaatatggtgaccagttcctcccgcagcgcccccatctccagccccaggctgcacagctgtcccagcagctggacatccactcggcgcaggttcccctgccagtaggaaggggacgtcacagggatgccaccccagagagcaaggggtctctccaggacctgggtgagagcaggtcccaactcatgtcctggccacagcgcctgggcagggtcctcactgtgcccatggaccctaactgccttcctgcttctcagagtgtctcttgatctctaactcttctctttgtctctccatttcattgtccctgacttctctctctctgtctcctccctctcttatctatatctgtccctgtttccctttgtctctgtccccatttattttttgtctttccatgcccctgtctctctgtctttatgtgttgccatttctctgcccctgcctttggctctctttctctcgcttgccctctctctgccctccccaactttctcaaattcagtctgtctctccatctctgttcctgctctccgtctctgcttcccacctctgtccctctcttttgggatctccctgtccccacctctgttcccgtccctcactctatgtctgtctctcggtgtctgtacatgcctctcatgtctctgcttctatctctcagattctgtttttcgatctctggccttctctatttttgttcatttccattcattctcatttcctctctttctctttcccttccaaacccctcactcaccagctcctccctgatccacagcagactatcgcaggcacctccagtgtctgcccctgcagtcctgagggtctgaccagggatttccactggggagacctccctcagggcctgggggggtgggcccagccccggaggcaccagtccagcctgattcagctgcctccacagttccatcgtctctgagctatggctgcaaggagcaggaagtagcaaggtccagggtggcctggtcccctggggagctgtgtgcgtggtggagagtaaagggcagagggagtgggatgggggttcctgggaaaggtatcccaaagtccactcttcagagagaatcagctggccttgtgcttttctttttccttctgaagtctaacctcaactctgctcacagggttcaaacatagcctcttgcagaggtctaactccacccttccctgcctgtctcaggcctgacccctcaggggcgctcagtgtctgtagatgcctggcaccctctgtccttccacctgccccccaccaccacttctccagcctctcctcagcctccatttgacctctggcttgcccatagcttggtccttgcttgtcctcttggcacgggtcatcctagggctttcccaccagtgtgcctttgggggcaggaatggctcccaggggcaccaagacagcaatcccttagctggagtgcctgtgtccaggctgctggcctagggccaagcagccaattctgctgaccctggacttgcctatgggtatattatccctgttgagggtgagggcttctgctgtggaaaagtctgggaagcactgcaggcctctctcggccttggacccttccttcagacccaaggtgcatatatatacatatatataatggtagatcacgaggtcaggagatcaagaccatcctggccacatggtgaaaccccgtctctagtaaaacacaaaaaattagccgggcatgctgccgcgtgcctgtagtcccagctactcgggaggctgaggcaggagaatggtgtgaacccaggaggtggaggttgcagtaagccaagatcacgccactgcattccagcctggcgacagagcaagactccatcttaaaataaacaaatgaacaatatatatatatatgtattttgttttttgagacagagtctcgctctgtcatccaggctggactgcagtggtgcaatcttggctcactgcaacctccgcctcccgggttcaagcgattcccctgcctcagcctcctgaacagctggggttacaggtgcacgccaccacacctggcgaatttttgtatgtttagtggagacggggtttcaccatgttagccaggctggtctcaaacccctgacctcaggtgatctgcccacctcggcctcccaaagtgctgggattacaggcgtgagccaacgcgcccagccccaagtcccttttaccatagaaagtaacatagtcacagtgcccagggattcacaggtatggggagagggttcgttattcagctgccacacccaccttcctaaacctgctgcccttccagtttcctcacgtgcacagccacgcccgtctgcttttagtttctcaatctgttggcttaaccttcaaaacaggcccaggatttgagcacttctcaccattccctctgccccatccccattcatctcttgcctagactgctacagcagcctcttttactggtcccctgcatccacccttgccctctaaggcaagggtccccagtccctgggccaaggaccagtaccagcccctcgcctgctaggaactgggccgcacagcaagagatgagcagcgggtaagtgagcattaccgcctgagctccgcctcctgtcacatcagcagtggcattagattctcataggaggcaaaccctattgtgaactgtgcgtgcgggggatctaggttgcctgctccttatgagaatctaatgcctgatgatctcaggtggaacagtttcatcccaaaaccatccccaccccacccccgacccccagtctatggaaaaattgtcctccacgaaaccagtccctggtaacaaaacggttagggaccgctgctctaaggtacattctccacctggcagaaataatctttacaaaatgtaaatccgattttgacactcccttcttcccactgtgaatagaataaaaccctaccaggcctgcaccgtcagcccctgcccacctctcaacccagtctcctatctctgtctgcaagctggttcccacctcaaggcctctctgctctagaggctacctctccctgcagcgcttttcccctagatctttgaatggctctttccttatcattcacttctacttcaatgtcacctcttcagagaggcctttgctgatggccctacacccagtcacttttttttatctgcttctcatcaaaattgccttgctgattcctttgtttcttattcatcctctcccacatccatcctctcccagcccagaatgttgacttcctgagagagggactgggtctgtcctgctcaccatggtaacctcggcatctagaacagtgcctgccatcacgtggtaggtgctcagtaaatattcttggaactaatgaatgaataattctatccacaagacttcacaatggctcttcatgctgcgatctagctttcaactccaaactggtcttgagatctcacctcagtctctaaccttgacatctaacctcttcacccactctcttacctgaccctaatttttaaaaatgacgtggtcagcttttcagccccctcattccctgtttttaggaggtagtgagtggaagctggaagaataagaaagcttggggagactgcaattgcagtcaggaaagaaaggtactctgccgggaagaacaccccatcttctcctagggaaagattgtggagtcctggggtttgttttgtttttcaattttttgttttaagagacagcgtctcgctctgtcacccaggctggagtgcagtggcgcaatcacagctcactgcaacttcgacctccccggctcaagtgatccccccgcctcagcctcgtgagtagctgggaccacaggcgtgcaccaccacgcccggctaacattttattttttgtggatataaggttgccctatttctttgtggagataaaggctcccctatgttgcccaggctggtctcgaactcctggcttcaagcgatgctttcgcctcggcctccacaaagtgctgggttcacaggtgcgtgagcccgacctgtgtctcgttttgaagctcagggagagggcgctgtgagcaatccctaaaccctttaagagtaaaaagtgcgtgcacctttaagaggacggttagaaaacgcggggcgtggccacaggagaataagttcgcgctgaaccaggagcgtgggataagaccggccccttccggttacgaaaccttagcaagatggcggctccctgggcgtccctgcgcctggtcgcccccatgtggaatgggcgtatcaggggcatccatcgcctgggtgcggcagtggccccagagggcaatcagaagaagaaaaggacaatactccagttcctgaccaactatttctacgatgtggaggctctgagggattacttgctccaaagggagatgtacaaggtgcatgagaaaaatcggtttcgagacaaggagtggatcaggccagataagtatggccatttctctcaggagttctggaatttctgtgaagtgcctgtcgaagctgtggatgccggtgactgtgacatcaactacgagggcctggataacctccgaacctccgcaggctggacatctcggacctccctgccgtgtccaaccctggcctcactcagatattggtggaggagatgctgcccaattgcgaggttgtgggagtcgactgggctgagggcctgaagtcagggccggaggagcagcctcgggacacagccagccctgtccctgcctagcctttagccctgtccccactcacgtggcttctcagcgggctgcatggaatgtctggtagctcaccacacttctggcttccatttgtcttcactcaacgtcagggtgggggagtggtgctggccaatcacaggagagagcgtgagttcccagtatttattcctggctgcccttggctaaaggtcacagctcctgtcaccctgtcaggcagccctttccatgcccctgttcaggcctggggaggtaaaggctcaggctgttagtagccgcagagagccacactcaccttgtcaggagactcttctcaaactgtccttatgtgagtgcactgccatttcttgcagggaccctgactgacacaggggctactactgacactttacagggatggttctcccccgtgcagggccgctgtgcccactgcaggacatgcagcatccttcgccccactccactcactaaaggccagcgcaccccaggccccatagtattgctggttatggatttattgactttatgttccaaattcagctttttcagttggctgttttttgaaaggggataagctttgtcagtagagggcaccgaacaggcattataggaggaaaggcgcctccttcgtggttcttgttggttgtgcttctgcctctggacgccgcagtgcatgtggcttccccagcacccagctcctgaagcaccaggcggtcagcagctgcccttggcaccctccagccctcagaagttgcgtaggagacacagcgcctccactgaggcacctctctgggaataacgttccccagcaccccaaatggatttccagtcaattcagaagcattttaccagtgaagccctcattattccagttcactgttaaagccagtaattctctatattaaactttccctgttcggtttatactccggagtataaaccgaacaggctatcagcacccctactagttctaaccacatgactcctcccccttatactaatagctagccaatcccacctatcaaaagaaaccacaacccgaaaaaaactatatattaccatactaatcctactacaactattcctaattataaccttcaccgccacc

SEQ ID NO: 735333 - DNA, 188140 bp, Homo sapiens
ctccaaggctgagggatgaggagacctgctgaggacccagggccttatctttccatcccactccataggtcccagtattgactgatgctgtcttcacctcctagcctcacttttaaccttctggcacccgcccaccactgtccagttcactattgaagccctgccgtccagtgctgcagagggaaaggatgttcttctactggcctgcaatatttcagaaactattcaagcctattattggcacaaggggaaaacggcagaagggagccctctcattgctggttatataacagacattcaagcaaatatcccaggggccgcatacagtggtcgagagacagtataccccaatggatccctgctgttccaaaacatcaccctggaggacgcaggatcctacaccctacgaaccataaatgccagttacgactctgaccaagcaactggccagctccacgtacaccgtgagtgattcccccatacctctgggtgctggcggtcagttctgcttcacacacatgagattgtcaggcctgggctgtgcctgcatccccctctgcattttgtcccgtgttgagatttgggcatttagtgcaggacacacacatggtaggtaaacttcaacagatcagaattcctttcctgcatccaggccctgcagacactgatggcgggggcgggggggcctcagcagggggaggtcagtctcagccaagcaccccatgccctccccatgaacctgaccctgagaaagaccctggagaactgggtcagggcctggcctgagggcgtcctgggaacctcacaaaagcccagcctcaggactcctgactccgtgtgaccccgggaagcctgtgtcagggctggggtgtggtctcctgggcagggcttactgggagcaaggatttaccagatgtctgcgggctgtggttcctgaagcttctcatcagtgagggctcagctcccagagtctcatctagacaaggacagagcctaccactttccctgggactcagcctggagagggcagggggacaggattactagggcattggccccctgaatgaggagcttaagagatgcccttgggcagtcagtggcccaggggtaggaacagaggggagaaaatgttcctggcagcttcttgtccaccggggatcatgcccaggggtgctctcccatggaggcaaataacagatgctgttgatgtgaacacctcctctgtgccaagcttcatgtcagatcctgtgaataatttaaagttcattcacagacaaagtggcaagcctcagaccattttccatttacatattgtatggaggggaaactgaggcacagagagatacagacaccggccacggtgggcagatcgcagctggcagagtcacatgagggctgtctgcagctgctgccacgtcctctccttcatccctggtgccttactaggtgtctgtggaccttagaacagccactggttcggatgttttcttcttaggtgtctacagctcggagggggagattctggtctggagagttatgagtaaatacagaattaatcagttttttcttaactaaatcacctgcctcaacaatcagtcagtgctggggaagttcaggcctcctcgctcaggtccacaccccgcatctctggacatgaaatggcttcgtgtgttttctgatgtgtgggtatcattccaacaggaggataaaggggaggactttgctttctctccccattcacaccctgcaccagccagggcccagtgtgagacacatactccgtagttctctcatgaaggagggagggaatgaatgaaggaatgatctataacctcttcagagacagagacctggatacaagatcctaggaggttctgggcccaacgtgagacacacactctgtagttctcttatgaaggagggagggattgaatgtaggaatgatctataacctcttcagagacagagatgtggatacaagatcctaggaggttctggccacacctgttttctgtccctctagagcctaagacccatgtctcattcatctggcccgtttctcctaaatctgcccctgggagctgagtctcatctgaccctggggctgcagggctgtgggaaggttttcaggggagggatcaggcttgcgggtagtcccacacgtttgccttacaccctggagctctacctggttctcactatgaatatcccataataatcccccctatcctttctggggagtagaaaaaaagtaaatatttaaaaatatgccagagcatctgttcttcttagcaagttcagatagttattagttagcaggaataaatcgttattttaccagagcctcacctgctgggggtttatgggagcctaactgactgaggggggtgggaaatatccaactccagccccctctagccatcatgtcccacctaaaggagagaaaaaactgagaggcacttgtgacattcacagcccagggcacagactctatccaggaccacagaacccctccctccccccactcaccaccgcatcactgaacgcctgctcacccaagttcctgttgcccagtacatcatgtcctggctttcaacaaaaactacaagacagactagaggcaaaaaaaaaaaaaaaaaaaatgcagttcgaaagacagaacaagcatcagaaccagatgcagatgtggcagggatgtggcagggatgttgaaattatcagaccaggaatttaaaacaactctggggccaggagcggtggctcatgcctgtaatcccagcatttgggaggccgaggcaggcagatcacctgaggtcaggagttcgataccagcctggccaacatggcaaaaccccgtctctactaaaaatacaaaaaattaggcaggcatggtggtgggtgcctgtaatcctagatactcggaaggctgaggcaggagaattgcttgaacctgtgaagcggaggttgcggtgagcctagattgtgccactgcactccagcctgggcaacagagcgagattccatctctaaaacaaacaaacaaaaaacaatactggctaatatgctaaaggctgcaatggaaagcatagacaatgtgcagaacagacggatgctgtgagcagagagatggacaggctaagaaagaataacaacagctactatatctatctatctatctatctatctatctatctatctatctatctatctatatatatgtatatatatgctagagatcaaactcactgtaacacctggatctcagagtggttgtgaggatgtttattaggagattaaagagattaaagcagagttatacacagggcgagagctcaactgatgctatcaactagtattcttatttttttgatgttgttattggcaataaaatcaggaacaatgcagtaaaaatttggttttatcatgtacgagttctgtgaccttccttgacttactgaggtactgtaagtctcagattctaactctgcagatggcggtgatgcccctctccctcaaggtgatgtgaggatgagatgagctgtaggtaggttggtgcccactgtgcctggcacatggaaggcccctgaaaatagtcaatgaacatcatccccgctcatcagcatggagttgacagtgagggctcgctctctgtgacaatcatggaatggaaaagaagaaacaagaggaagactgggcgcagtggctcatgcctgtaatcccagcactttgggaggccgaggcgggcagatcatctgaggtcaggagttcaagaccagcctggacaacatggcgaaatttcatctctactaaaaatataaaaattagcctggcatggtggcacaaacctgtaatcccagctacttgggaggctgaggcaagagaatcgcttgaacttgggagatggaggttgcagtgagccgagattgcgtcagtgcactccagtctgggtgacagagcaagactccatccaaaaaaaaaagaaaaagaaaaaagcaacagagggaagaggtgtgacatgagaggaagaagggatttaaaggtacaggagcagggcgaggtgcaagcacctgtgggagaatgtaggagttggtacatcccagtgtgtcaagtctgagacacagaaaatggtgcaaccgtggagagcaagggagtcagctatgaggacagcccaacagaccacactcaggctctggagcatttccttcctccctgactatgcccctgccctgcaatgccccttatggtttcccttggaacaaacttgggccttgtcccctttgccttcccctttctgcagaaaacaacgtcccaggccttcctgtgggggccgtcgctggcatcgtgactggggtcctggttggggtggctctggtggccgccctggtgtgttttctgcttctctccaggactggaaggtaccgcagcttttccccagcctcctcccacccctaggctgaccccagtcagggaggagggagaccccgccctgtattcagggccaggctttccgcatcctcccaaggaatccttccctctcattccatggctcctcccttgccagctgctgatcctaggctgcctcttcctttatgaatgtggcacagttaaggttgcacccctgagtgctgtcctagttccctaacacagcaaagccacagctgcctggagggaggaagggagggagggagggagggagataagacgggagtgctcagaacctggtaccttctgctgttcattgaatttacccacccagtgaggagggatttgcaggcttgagatccatggtgggggtcctgggcatggtcacgcagtggggagtggcaaagcctggacaggctgggtagggtcagcaccccatcgtgattgatgtccctgaggtgtgagatgggagaacctggacctcaggacctgctgtcctttatgtctcttgccaaggggtggagagagagaggacaaggccattgccccatttcagcatctccaggcctgaaaggagggtctggccatggcagggatactgagttctgggagaatatgatacatgctccttgcctccccatgcccccagctcccccagtgtcctgcacacacagccggccctgctttccctctggggccttgacccttcctctcaggcaaacgcaggtggtctgattccctccctgagtcctcagtccctttcctgggtccctgggtcaatgttctcctcacccggcatctgcctgggggggtccttcctctctggccaggacagacgtgactgcttaaggcctatcctcagctccccgtcctcggccgctcctaccacgaaactgatggagacaggaggccttcactccagtccttgaaaatggagtcccttccttgtcctttattctgcccctaaacctgtgatttctccctgcaccctcatgaataatcctgacctttcctagggccagcatccagcgtgacctcagggagcagccgcccccagcctccacccctggtgagtgtcccttcagcccaggtgtgggagcccctaggcctgccctacggtgtccactcctgccagtcaccccctgggggcctctgaccctttctttggggctgcaaggaggatgtcaggaaacatgacacaggggaccccgactgtcttgttcagactgatctgtgggctctgggtcgtgggtcacctcctcgacctcagctgctcaggtctcccctgggaagaggctccctctccctgattctctgggagctgaggacccctacactctcctgcaggaggggcccaggctctcctcccaccctgctgctcactcctgtctctgtccccaggccatggtccctctcacagatccaccttctcggtaagcctgttccctccccagcccttttctactggggtcccaacagtgcaggctcagggcagggggaccatcaaccccacagcacagcactgacccacctttccccagaacagtcaggtcaaagtgagtgcctccagccaggatccgggcctctctacagggccaggaccacccacgccatgtgctgacccctccccgggaccctctacacctgaggagaaccctggagtccagcaggtgcagaatggacactgggaccatcagtcagaggcccacattaacaagggtgcggggtgggcccagccaggacaggggtcagggtgttgtgtccacactgggaggctgagctcaggggcagagctggtcaatcctgaggggaaatgagtggaagtggaggcagggaagtaagtcctggccgatcagagacaggaaccttccaggctgggcttccgtgaccctccctccctgtcccctgacatctcctctctcccctgcccaggcccctctacccagccccagaacagccactcccatctatgaggtgagtgtgggccatggatgttctggtcccgcaggctccaggggacccaggatctgcccccaccagcacctggctgagctcagattcaggaaaatgcagtgaaaatgagaacaggtggtggtgagcagaggagggaggggcctgggaacagggaccccctgagcacagccaggttcagccccagagaagccctgggtgggcccagagcctgggagatgccagacactgttctgagaaggctacaggggttgaggcctcttctctgtttttacaggaattgctatactctgatgcaaacatttactgccagatcgaccacaaagcagatgtggtctcttaggttcctctgggagctgctcttgtgggttgatggagcgtccccaaagctcccagccctggggacggggaaggacatggagcctgagccagagaaccagctctgagtcctgaggagacacaggcctggggacagggagggatgggagtccctgctgaatatctggagaccctgacaggttgccctgggctctgggtgggccgggacaaaggcctctcatcaccacaggaagcgggggcttgcaaggaaagtgaatgggcctgtggcccacccggggtcaccaggaaaggatctgaataaagaggacccttcctctcattggctctttttctgctcacgggaacttagcagaaactcacctgaaactccgtgtccattctctcccgggtcacacagggaaaatatctccaccttgtctcaaccacagtctctcttccctgggaggcagaaataggggttgggagtcaggctggggtgggccctacacaggaaagggcaagattcacatgagccctgcccagccagccgagcgctcagctgtcctcacactaccccagggaccaaggccatgcacagccccagcctgggtccctctgtgaatgcatgtggggtctcaggagcacagaagatggggccatctgatgtccacaaaaggtgagcaatgcgggagcaaccatgggtggtataggttgcggctgtggcccctacgcagcctccagtgtcctgacccctgctgccctcttcacccaggccctggaggcccagtctatcactgtcctccacaaatgaacttacctgtccccaaatccaggatcctgtgtgcttatacctggccactaggttctcctctgtcccagtggctactgctcaggacatctttatccctggtggggcacagagaggggctgtcagagcaaccaagattaatacagacgcataattcagtccttgagcactacccaggactctggcccctcattgctcatcagttcccactttaccccctggcatggatctcactgagcaagccaactctttacacaggagcatccaggtcagaggtgcaggactcccccatctaaagctcatgcaggctcccatggcgatgggacaacctgtctgctcctctccctggcccacagccctatctcgcctgcagctcctccacacacctgggacagcagttctcagcccttccctgagggcccctggaagggtgatgatctcatataggttcacttgaaccaggtgccaccttcccacaagtgagctggtgcctgcactaaagcacagagccacagttcccaagagtgttctgccactgccacaggtcccaagagtgttctgccactgccacaggttgttcgtcctgagatgagaggtaagaaaacaacccgcaatgggttgttttatatcgggatttgcatcaggatttagctctaaatgacccctgatcccacctgcacacagcgtcagatgagacaaggtgaggcctctttagttttctgttgaggctgtgacaaattaccacaagcttagtgacatagaaacctgaaccaaagtgcccacatggctgtgttctttctagaggctccagggaagagtgcatttcctctccttttccacctcctagaggcctcctgcaaccttggctgtgtcctctttctccatcttcaaagccagcagcacagcatcttgaaactattctgtgccctgcttccatccccacatctccacctcctcccacctccctctctcacttaaaaggaaggagccttgtggttattttggacgcacctgggataaaccacaacaacctccccatctcatgatccttcctttaatctgtaaagtgtcctttaccacgtgacatgtccacagatctggggatgaggatgtacacatctttgagaggcccttgttctgtccatcactcctctcaaggccatcttctcatcatcgttcactacaaactacacatgggcacctggatgggttcatcatgactgtggcgtcagttcctgcattaacatccccagcaccctccagatcctgagagagggagacggagggctctccatgcccctagtacctctccaccttcttcttggtgacatgcttagttgctaagaataacagaaagcggaggtgactgaaagatcacaactcaccggcccttcaatagttcgtggacatcagcaccacggacagtgactcagtgaggctaatttccaggtggcagcagggagcatgcagataggagggaactgcaggaaaagctgcccattctattctatatgagaaagagtgtaagaaagaggaagctattacagggataatgctattcttctctaatccataaattgcgaaacctttgcatgtctggatatcatggtttttagcacatctgctgccactccctgcagggctgattgctgcatccaggatgtggtctcttggggggctcacagcctgctttggcctcatggtgagtctccctgcccctgacactcaggccactgtctctgcctacaacatggtgggaaccttccatgattaacgtctgattctctgtgcctgacctttgaagcacatccatcactcagcctggagcatccgctgagctcagcatcctgctcctccatccccagctgagcccttgaggagatgcttgagaggatctcctgggctcctctgtgagctcctccaggctgagccttgtgcttggtgtcagaggcctttgccatctgcttgttctttccataggcaaataatcctcctcagggacaagtggggcctgaagatctgtctgaatatctatctatctatctatctatctatctatctatctatctatctatcatctatctatatgtatgtatatatgagaatgctttattaggcaaaactgcatactatgaacatgctttaaaatgcaacaggatgagatgtgaagacataaagaacaagtgtgtagtgacacatggctatcagaacacactgaagaatccacaccgcggccgagagcagtggctcacgcctgtagtcccagcacttttggaggctgaggcaggcagatcacttgaggacaggtgttcgagaccagcctgaccaacatggtgaaaccccatctctactaaaaatacaaaaaatttagccgggcctggtggctcatgcctgtagtcctggctgttcgggaggctgaggcaggagaattgcctgaacctgggagacacaagttgcagtgagctgagatcgcaccactgcactccagcctgggagatagagtgaggctccatctaaaaacaaaacaaaacaaaaagaatccacactgcttccccgcttcactttacccagaaaaggaatgttctaggccacttcctcttcagcacacatccccagggaactaaaataggttcacagtcacccccatcttcctcattcccatcacctcttacccacagaggcatctctggtcctacagatccagccctgccttcaagaggcacaggtccaacccatccagtgtccctgctagtcacacacagcactcagggtacaatggagggcttctgtgctttggatgggaacaaaccccacctcacattcccacacctgagaagccaccagggtcctctctgtcctgtcctcacactcaatgtctgtcctgggtcacccttgtcatctctcctggaaataggcatggctcctgacaggtaggattgaggctttgtcttttcaggagtccctcccactctgagcacatgaaactgctcagctccatgcaaccctctctcaccaggggccttgttctctgggtccctgaatacctgggtccatgccatgtacattttaagaaaaatgacagtgactctcaccctgacatcctcacccaaggcacgtgtctgacaagaatcaccaggtgagatacctgtggctccacacacctgaggcttcactgcgcaggggtgtcctcatccctctcctcccacccctagggacagtaagcaccacaggctgccttggaccaccagctccccctcccagacacagcctcagatctatactgacatgctacatggagaggctctgatgaacagcaggtattaggaaatcccaccgaaccaggtgccacttgcggccccactcctcctcatatctgtgactgggacagacacacataacacacctctgttcaccgcccagcccccaaggtcaatcacagtctgcttctcccctagatccactgctccccatgtcttccgtcctcagctgcatcctgggtggcctccttgctgttcttgtaccccagaggcaggttccaacctttgtgatgttgcctgcaatgcccaaactttcccttccccttccccttcccttttcccctcccccttcccctccccttcccctccccacccctatcccttcgtcttcccttgtcttcccttcccttccctataaagccaaacatacccatccacctaccttgtggtcaaagtcatcagcctcctgctccactcagtgttctctgaccctgcatatggaggtggtggcccctcctagaacacccaccactcactgtcagccttgcgtggtaatcacagattttgcaggggttacctgtgttcaggtgtgtcacctgtggaaccagaactcttggaaggactggcagagggagctgcttaggatatctcagggctcctggcatctggtctaccacagggctattaacaacagcacttagggacaaggtggaggatggacggttaagagggtaaatatggatgatgtgtgggcaaagaataggacacaggaacacatgcagtactcaaataattatgccaagaaaggtgaggacatggagatggacattcccatatacttctgatgggactgcagtttagtccctacagcaacattgacctcatcatgtttaacgcgcacacgctctgaccactatcctacttctgaaggcctccctgtgctgtgagctctgagaaggccaagcttgcctgttctgtctctgctaaagccagagaccagccaatagcccagcacagggtacttcataaatacatgttgaaggaatgagctccaggaacagtactccacatggtagagatgtgtgtatgaggatgttcactgcagaaggtcatgtcaatgtgacaagtgacgagcagcctcaaatccagcaacaggggtgtgggtaaaagatcatagtgtagccatgcaatggaaccaatgaaaaaaccacaattagagcaaatccacatgtattaataaaggaggtgccctccatacatgctgcacctaacagaatgttgccaaataagaatgaaaaatgatgatatttgggctgtaaaaactagaagtcagctaaataagaatgcatcgaaagtatttgtgaatgcttacaattttataatgccttggcatccgttttggatggaagttggactttctcataccagaagcagggctcagtcacctttgaaatagtttccagttctccacctccttccagttcctcagtgtgattgatcagatatctgatttatacaactgcctcctggtgacctcctccctatgggacttccggatacagcccgtatgactgccccactgaccccacaccctgcctgctgcagtgaccacctctaattacctggatctcatgtctgcttgcattaaatccaccaattaaaactccctgaggacaatctgtttgaataatattctgtaccctaataaaggccttgacccatgggttccccctctgtcctccccatactgcccctgacctctgtgtgtgtgtgtgggtgtgggtgtatgtgtgtgtgtgtgtgtgtgtcctccagacagggcctgtatcccccaggacctgtaagtaataaatctttattttcatcttatgtctctcgcaatcattggcaagagctctgcatcttaaagatcgcaaatttaagaaattggtgtagtcggcacaatagagtacctcttctgtttagcacaagatatctcggagctgctgaggcttttaacatcctcgccggtgtggctgcctcactggtgaggccgttctgttcagtgcaattcagttgctccactgtgtgctgctgtgttgctgctgtagagtgctgccatgttgttctccccaaattgttaccgagtaggaacctgtaatgtgctcccaaggtggtctaccccatgagaagggggattctccatctagggcaagggctaggtgtgtttctggaatcctaatagggaaggcatccacagagggtgaactccactcctccttagagtgaggagtgacatttcccatttattttccccatggaggtgccatgtattgactttttctttcactgtcccaaggttgagccaaggtgagctatggagaccagggcaagataccatttctgttagcaaagcaaatgggtgacaacgtgtggagaagctgtggttctcctgatggatatagcagagtgccatttagtaaaatcttgtcaggaggctgcccctggttagaccggcagtgtctgtagtcactaaggtggatgcgaattttaggccctgggccatggataatccctgcagacacagccgtggcttcatgtgatggggcaatcccgggctagtggctcccttgtttctgcatttcttgctgtggttgcacaatcaacacctcaggggttgattgggtcaccttggaaagagaaacagctgcctaggaggctggtgcacatggaggccaccctcaattttattctgctaacaagttgtaagattaaaacaacagggggctttgggtaccatcaggaacttgtcaagtaaacatccaaagacagaaagaagaaaaagaaaaagacattaaccgtctagaaatacaagccattttaaagattttgcttaaaagatgcgcttgggctgggagcggtggctcacacctgtaatcccagcactttgggaggccaaggtgggtggatcgactgaggtcaggagttcaagaccagcctgaccaacatggtgaaacctcgcctctactaaaaatacaaaaaattagcagggcatggtggcaggtgcctgtaatcccagctacttgggtggagaatcgcttgaacccgggaggcagagacggcagtgagccaagatcgcaccactgtactccagtctgggcgacagagtgagacttcatctcaaaaaaaaaaaaaaaaaaaaaaaaaagacgggcttgtttcgtcgttgtggagtcatcccagagagaggctactccctagagtcactgaccacctttcctcctccatcttttcctcttatcattctagagacagaaaacaagaatctcagctttaggtggctaacctcaccccccaagaaaagaaactaccactttgattgactacaaatccaagaaaaataaaagagaaactttaaaaagtactgagcaaaccacaggtctagcaaacataatgctagccctaggttacttattcatttacaacaaacccctagatataggaggaaaaaataaaaggtaattaaatatatacacatacaatattttaatataaatatataataaatagttaaattatgtatgtataatatgtaactaaatcaaagtaaaatttcatactttgattctattggaaattcaaaattcatttattaacttatatattaaggaatttatgtaaaaaaagatttttaaaagggcaccaatttgcttttgtgtctctacaacataggatctaatttaactttacatttgctaaatacactaattgacaaatattcatggatttaatcaatactggggctcaaattgtagccacacgtgggaatcccataaatttaaacactctgtccctattatcttgagaagaaaactaaatataaaattgaaaaaaacaggtatgtctcaatttacctgtaactttgcctaaatttcccggagtcatatacccattgctgtaaaacattctctattggacataggtgctctgagacaataaataaaatagaagtgtttttggtacttagacattggcttgacaaaatgggatcccatgaaacctcagttaagatagtgaatacggcccaatgtgagttgaaatggggcctttaaggattaaaacttattacatgaaacctagtaagtaatggggtgattatccatactgcttctccatttcatagcccaattttgacagttgtcaaatctggaaaaaacaaacaaacaaacaaaaaaacccctgggaatctgttgcctcacagagacacaaagtagacatcaaaattgtatatctcagttccagttccaaaatggtggcatagaagcaagctggctttactccttcacacagaaaaccaaaaacaaatatacagcaccaaaattattaccagatatattccagaactcaaatatgaaaatgaaacagttttcagagccacagagaagtgaaaaaaactcccgacagatgacaaaagaatcagatttccccatctgtaatgtccctccctgccccattctgcctggtaccaggtgtgtggaaaattttaccccaactcatggtttctacactgggaaatgtaagatcaatgcgggcaaccagtttctgcacaatcctgggttccctgtccctgccttaacccacaagaagcattgtgagtgcccgaagggagaaatttccctgaggacagtcaaagagtggggaggcaggactaccatctccttccctggaaactctgctgtgtaactcagccaagggagacatgaaatcagactggtgtttcagcagctccatgttgtagtaggtttgtttcacaggtatcctgggcatggacatctagccagctttcccacactgccaggatatcccctttgggacctccctcagttaggaagggcacactctgatcatttactagggccaaggtaaaccctaaaggtaacttagagatgaaaaggaggtagtgacctagcagtaaagaactctaagaaaatctatccaataaaaatcaaaacaagccagacaaagactaaaataaataatgaatccttcaatgtaaagacctggacttacatccacaagaaacagtaagcaggtaaccatgatctccccacatggacaaagtgaggaacaagtgactgatcctgatgagatggtgatgtgtgagctctctaatcaagaattcaaaactgcagttttaaggaaactcaatgatcttcaagaaaacatggaaaagcagttcagaaatttatcagagaaatttaacgaagggattgaaataatttaaagaaaacaaacaggaatcttggaattgagaaatatatttgctgaacaggaaaatttattagagtctctcaacagcagaatggatcagaggaaagaatcaacccaaataagactcccccaaggcataaaataatcgaattctcaaaagtcaagggcaaagagaagattttaaaacagaaagagaaaagaagcaaatggcataaagaagctccaattctgtggcaacagattttcagtggaaatcatacagaccaggagggagtgacatgacattctcaaaatgctgaaaaaatattgacatttgagaatactttatccagtgaagttatccttcaatataaaggagagagaaagtttcctagacaaacaaaagctgagataattcacaccatcagactagtcttcctgtaaatactaaagggtaaatactaaatacttcaatgtgaaagtaaaaaaaaaaacactaacatgcaaaacaaccacaacaacaataacaacatttgaaggtataaaatccactggtgaaattaagtacgtagacaaacccagaatactcaaatagtaattgtggaaagtaatccaatcataactctagcatgagtctcaaaatataaatctatcaaaaacaataatacattttaggaggccaaggttggcagattccttgaggtcaagagttcaagaccagcctggtcaaaatggtgaaaccccatctctaccaaaaaatacaaaaatttgcagggtatggtagcacatgcctgtcgtttcagctatttgggaggctgaggcaggagaattgcttgaacccaggaggtggaggttgcagtgagctgagattgcactactgcactccagcctgggtgacagagggagactctgtcttaaaaaaaaatagctacctgtttggagaaaggtaatataaaatatgtaaatagagacaaagtcaaaatttgcaaaggatgaaattaaagagtagagtttttttggggggttttctgtttctattattttatttgtgatctaagataagttgttaccttttcttctcttgaagatactttgttatatctatgtttttggaagtcttatggtaactgcaacgcaaaaaatctatgatagatccactgaaaataaaaaacaatgacttaaaacatactaccagagacaatcaaccacaaggaagacagtaaaaaatgaagaaaggaagaggggagttacaaaacaaccagaaaacaggcaacaaagtggcagtagtaagttcttacttaaaaatattgaacactgaatataaatggactctattctccaattaaaaggcatagagtggctgaatgctgcctatatgctgcctacaagaaaccacttcatgtaaaaagatacaaatagactgaaagtgaagggggtggaaaaagatatttcatgcaagtggaaaccaaaagagagcaggagtagctatactgatatgagataaactacaaatcaaagactataaaaagagacaaagaaagtcactatgtaatgataaagcgctcagttcagcaagaggagatgccaattataaatatctatgcatccaacacttgagctcccaagtctcccaagtatttaaagcaaacaatagtggatctaaaaggagagatagactgaatacaatattaattaggggactttaacaccctgctctcagcaatggccagatctttcagacagaaaatcaacaaggaaacttcaaagttaaactacacactagatcaaataggcctaactggcatttacgggacatttcactaactatctaactgttacagaattcacattattttcatcagcacatagaacattcttcagaacagaccacatcttaagtcccaaaaccagtcagaataaattcaaaaaagtttatatcacatcaagcatttgttctgaccacaatggaataaaactacaataaatgaataactttctggacacatacaacctaccaagatggaagcatgaaaaggcagaaaaacccaacaaaccaacatgaaactgtaacaaaaggaaaacccaggaccgaatgacttcactgctgaattctaccaaacatttaataagaactaaaaccaattctactcaaaatgctttaaaaaattgaagaggatggaacactttcaaactcattctacaaggtcagcattatcctgataccaaaaccagacaaggacaggacaaaaacaaacaaacaaacaaacaaacaaacaaacaaaaaaacactacaggattgcttgaggccaggagtttgagatcagcctgggcaacatagtcagaaccaatctcttaaaaaaaaaaaaaaagaaaaaaattagccaggcatggtggcatgtgcctttagtcctagctactcgggaggctgaggtgagaggaccaattgagcccaggaggttgaggccgcagtgagccatgtttgtgtcactgtactccagcctggggaacagagcaagatgctctctcaaaaacaaaaagcaagctgggtgtggtggctcctgcctgtaatcacagcactttggaaggctgaggtgggagaactgcttaagcccaggagttcaagaccagtctggacaacatagggggactccatctctcaaaaacaaccaaccaaaacaaagccaaaaaagaacataggccaacatcactaacaaacatagatgtaaaagtcctcaataaaatattaacaaaccatgtttagaaacacatcaaaagagatcattcactatgattaagtgagattcatcccagggatgccagtatggctcaacatatgcaaatcaataaatgtgatccatcacattaaagagaaccaagaacaaaaaccatataatcactccagcaagtgcagaaaaggcatttaataaaagaatgggttgagggagtggagcccatagtcagagcagcagtggtctgggattttggaagtagaaagaagggcagcaccactggccaggaccaccagggaacacccccataggccctgggtgttgtgctccagggagggttccctctggagttattaatcttggtgtccactttgcccagctgcccctcacagggtcagggaggatgaagggaaagcttccttctaatgaaagttcagggactcacagttcctagagcctgtagggagaggaagatcttcgaggaagagcacctgggcattggggcgtttgagaggaagatctatgccaggtccaagtggacaacctgtggactctctctccagggacatacgggtatctgggaatctcctgtagcttaaagaggtaaagacctctccctttagcctgaggactggaggatgctggttcaggtgaatgagtcctgcaggggctggtacaggcctggagggtggtggtgtccagggccttgggttcacccttagcatgattcaggccgggcggtgtttcacatgagcaagagggcctgggttcattgcttcaggacaatggtgaaatctcatggtggaagaaatcttgtccttgccagtgcccagctttcatttggtcttggcccagagtgtcctccctagagaagactcttgtcccttcttcacactgcccttcagggatatgccagccttatgggataagatggggtggagactgtagatgtgggtgggaatctctccacagagtgctccttctctcagcggttgcaccttgtctcagggcttcagcttgaaatctgggatctccaagcccttccctccccagtcctggccaggaccacatgggcagatgcattgtgtgaagtgcatttcatttggggtgtcctctctgcatggcaccctcccgttgattctctttgcgcatgtcagagtgcaggcaccatccacacctcctgctggaggagggacggagctgttgactcctgagagctgatcatgtgttcccaccctcacacacaatcatggtccatcctctgagggacatgtgttgccaccactgtggagatggtgcaactgacagtaacaaacagtaaaatctggtactgaatgggaccttaagccaacaatgacaatgtcattccaaggtgtttcatttttattgattcaatgcaagtcacctgatttcattgactattcacaatagctcgataaagtaaatgcatcatcaccaccactttaaagaggaaaaaggtgcttgggcagtttgtgactactgtggtggctgctgcattgctctctggtaaagccaagtaggtggtgggtgcggcctctgggctgggatgatccaccctcctggtggtggcaggggagccaagctggagccatggcctgtgcagtggtagcagctgaactgaccgctgctgcaggatttgcaagctgttacattttgcgaagccatgaagcacataaaacctcaagtagaacaagtgtttcaaagtctaccaaaatctgccttcagagattattactacagaggtggatatgaacccaaaatgacaaaacgggaagcagcattaatactagataatgaatgaacactagtaatagtagggtaagccctactgccaataaagaaaaaaataagagatgctcattaacatgttatgctcttaaatcacgcagacaaaagagggtctccttatatagtagccacaatcaatgaagctaaagatttactgcaagatcaagctaaaaacagtaggtgtataatgaatttttaacttcatattagtttatgtatatgaatatcaagtttttataataaaatgcctccaaacaaagaatatttgatttagggtttaataacttctaagaggggactcagatgtttcctgtttcacagtcagtctgagagggtcatttttcctggagctgacctgggtggaggcctcacactgatactccccagcatcctctctcctgatggggtttatgctgagcatacagtggccctgggacagctccattctctccatgagtcacagacgctggtcatggaagatccactggataaggttccagagtcatctgtggggcaggtcaggatcacaacatccttttcttctgtgactctggtgttgctgactcagatggggtcggagccactgaccctgtggacaatcagtggaggtgctcaactgaaagtgggctgagggcacgtcttctcctccatccctgggtccttaaggtaactgtggaccccagaccaactgacacaggagctagaaagaaattatttaggaagttagtgagggtaagagcgtccttggcaaggtttcccctttaacaaaaagcagcccaagataattccttttctaacaaagagcagcctgaaaaattgagctacagatgtagatgagcaagatggaagcttgcacaggtgaattccagtaggtgtgccaatagaaaagggctgcctggaagccaggtatgttcaacatggagactccatcctcccttttctccattaccacatgtacagtaaaaaaccaggcaacatggcaccggccaggtagacaatccatctgcatgacaaaagatcagagtggggcagccagcaaatggcacagctggtctaaacaatctttcaccccctgtataaatcagacactgcctcctgaagctcatctataaaaccttctgcatttcactatggaagtggcaacccattttccccaggacccctctctctgtgcagagagctcttctctttctttcccctatgaaacttccactcttaacttcactctgggtgcctgcatcctagttttccatggccatgggacaatgaacctcgagtattaccccagatgaatgatgctgtttcacaatcactggttcagctcccttcttcttagggtttcacagctcggtggggagaataccacgcctcagtggtctggggagtgaggaacaaatgaagaattaatcagattttacttagaacgctatcacctgcctcaaccatcagatccatgttgggaatgtccaggcctcctctcttagatctatacccacttcactggacctgaaatcctgtgtttcccgatgtgttggtgtcactcctatgagaggataaaggagagaactttgctttctctccccactcacaccctgcacaagacagggcccaatatgagacacacactcgctcagtagttctctcatgaaggagggagggagtgacctcgagtgattctgccatctgtagtctgtgtaccctggccagtggctgtatcttcatatgcctcagtttcccctcagtaaaataggacacacaatgagaactaaaaataaaattctaattccccagtgaactgaaaggatggcctcttggccaagcggatcccagagttcctgatcatgacaggatgggaggttacacctcattacagcccctccctttggaagtttagaggtgacaactgactagcattaacgctaaaatcgagatcatgagactgacagaacagactctctgtggccataagataccaaattataaactcaacctaaggtcatgcaggcaagggctaagccacactttcctacatttaaagaataagctatgttctaacacagaattttctttctctctagcggctaaagtaacactagccttcgagataagcaatattgaaatgatcgcggctcatccaccaacactggctaactgacccctgttccaacagccacaactacacttcaattggacaggagactgatttcagtaactttctcctaataagagaccactgagcatggcctggttctgctggtatacagacacggtgcactgagtaccataatgcttgtttcatcttttgatgtataagacctaatttaatacatttaaatctgaattctccaccccaaagtgaacatggggtgcatgtagcatgcatgtttgttgatcacgcatgtgcgtgtacttcctttgtgagtatccatagctccacctataacctgttgaatatgtatacctggccaactcattcagcataaatctatcttccacattcccctcccttgaagtgcctgctattggtctctgctggaggctgcatcttctaccctggggaatggccagcctgcaggctgtaaccctgtgtaagaaataacctggttgggtgcagtggctcacacctgtaatcccagtggtttgggaggttgaagtggtagaatagtttgagctcaggagccagagactagcctgggcagcatagcaagatcctgtctcttaaaaaaattttagggaggagagtgaggatcagaaaaaatacctattggctattatgcttagtacttggatcatgaaataatctgtataccaaacccctgattacatatataacaaacctgcatgcgtatctttgaacctaagataaaagtttgttttaaaaactatctgggtgcagtggtgcatgcctatagttccagctactcgagactgaggtgtgaggagtgcttgagctcgggggattgaggctgcagtgaattatggtcccacctgtgagtagccacttcactcaaacctgggagacagagcaagaaccggtctctaaaaaaaaataaaaatagaaaaataaaatgaaaaatatatgaaataaagtctcctttccaaacgtacagatctccgatttttctgccaacaatgataaatggtcagtggcttgccatgttgtctgtgaattacttttaaaatattcacgatcacctgacctaaaggttggtaccaaggaaccgcctgaatacaccgtctctgattatttgcctccaacagagtgttccctgggcctgatctctggtggacaatgagctgctgggaacatcctctcttctctattcctcccctggggatgctgaccttcccttggagtctcctaagttccccagggcagtcggctaatgtcctagggagcttacctgtcttctccataccaagtctcatgtgaaggacgaggctttgcccttgcccagatgaggctctgggggctgagccctggctggctaccagctgcaagagccatggcccttggacagctggtaaatccttgttcccagtcagccctgcccaagatgcctcaacccagccccggcacaggcttcccagggtcacatggagtcaggatcctgggacaggggactggacaggggtttccagggctgagtttctgaacaggggcttcccaggggtcccctcactccaggatctgacatggtcctacaaggaacgtccatggggaggggacccaggagggggaactgacactgacctccccttactgagcctccccccaaccccatcagactgtccttcctctgtagcaagtgcctgcagggtctggatgcaggaaagaaattctgatctgtggaagtttgtctcccctgtgtgtgtcttgcactaaatgtccaaacccccaaatgggatgtaatgtagagggggacacaggcacagcccaggcctgaaaatcctgtgtgtgtgaagcagaactgacccccaacacccagagctcatgagacatcactgtgtacgtgaaactggccagttacttcttcattcacaagatctgtttttatgacttgtagggtgtaggatcctgtgtcattgttggtgacattctgtatcagcagacatgtattggggtatattgtctctcagcctctgtggcaggtcctggggtaattacttgagttcctagtacatatcctgtaattcccctttgtaccagttgtagccaagcctaaggcagattgtgggtgagtggaagaatctccttgccttctgcagcttcaacagtgacttgggcagtggtaggcaagttccagaaagttaaaagtgaggctaggagtggggagagagcatcagttaatactgggccctatgcattgaggtggaaagatggggccctaggtcctggacaggtctcttcatccctcagccttggagtgtgtgtgtgtgtgtgtgtgtgtgtgtgtgtgtgtgtgtgcgcgcgcgcgcgtgcgtgcgtgtcctactgggccaaggtcagcagcatgacctcccttccttcagtgcctctgaccttggcatttccctgtttggagtccttttccccaggggtctgcctggctccctccctactgccttcaggtcctgctcacattagggcatccttgggagaccccttccctgacacctctagagaccctgggtcttccctttctgacctttcgctgctgtgttccctccagggctcttgtcaatacttgacctcacattctagatacccttgcatgtctgtcttcctccctatgagagcatgagctctgtgagaacagggacttgtgtgatcttggttgcaccccagtgcctgggacaggctgcggactcctgtggatgagctcatgagtgttcccagggcccttcacaacgtgggatttattttccaatggctgaggttgttggctaagagctctgttggagttcaatcaggctggtgggaaaaatattagagatagttatagagatagacacaaatcttcttggaagaccaaaaagtttgcataactttggtaatagatctgactgaaggtggtccctttacctttagttaaacaaattaaagtagtaacaaaggaaggcagagtagtttgtctagccagcttgtttactcatgtgatcttaagactaaccattgatgtgccacaggtgcttaattgctttctacttgggaagtccacaatgtcaattaccctctaacggtgttgactcaagcctttgttaattaatcttactgaataaatatgagtctcactagctgatcaaggccatggtcacaactgtttataggactcagcagggagtctgtaagcggccctgacagactcagctggactggcaaagcaaaatatgtgtgtgtcagtgtacactattcacccgtcccccacagctggtgcccctatatgaggagtgctgccacagagctctgtttagtgtcccttgttttttttcttgagtattaccccaacttaaattgtgattattgtcatctgttttcaacattaactgctcagtgatgattcacttggaaaacattaacaatcgagattgtttcttcactaacaacctcagattatttagattttcctgttgtaatcccttcttcctgtttagtgtccaacagaagccctctgtccctctcaggtccccgttctctccaagaaaccccagccagtctctgtgctccctcctcccatccactcccagggagccctcccctcacctgtgagcagaagcgcctgccagggatgtgcactctgtgaggaggggctgagggaggccccatgggctctgctgtctgctttgtcctcctctgtggagaggagcttgggcttcagaaaataaggaggccagaaagtaaggaacaggctgagaaataatggggatgtgtcgaaaggtcacagatgccaacatctttgtcctatgcaatattatccataaaattacaggtttgagatatgcttaaattttcttctaacatgcattaaaataaacatataacttttaatagttatattaaattgtatttaatataaattaaatgctcttgtcagagctactgtgactgtcagctctgctgtccttcctctctctgtgctaagcctcctcccagggcagaagcacttcccagggccaggggtgggggcggggaaaggtaagtggcaatgaggatctgcacaggtagcctttccgcctcctcccctctcagtcctgcctccttgtcttcttttcctctttttctccaatctacatttcagttccttagaccacgctgtgagaagcaaggcttattgggacccccatcccttaacaggatgacctgtgctccccataagtgacctctgctgtgtctagggattggctctgtcagcacctcacagagagtccctggggcccccaaactcagtgttattttctctatgacacagaaacccctctgggtatgcaaggttttcctcatgttttctaatgtctgggaaggttggatttactcccagcagggaggtcacagagatgtccagggagtggggtcctagaaatggacaaatctagagctaaagcccaggtctacgattttcagttgtttttttctgcagtgctatgtgaccctaatttcctaggagtaactaaaatgcaaacctcagacatttgtagacattttatgatttttctctacagcttgtaccactgttattattatttgctttatgctttttcctaaataaatttactttacaaaacatccttgtcctagtagggtgcaggggctcacgtctgtgatctcagctgcttgagaggttgaggtgggtggattgcttgaggacgggaatttgagacaaaacatctttgtcctatgcaatattatccataaaattacaggtttgagatatgcttaaattttcttctaacatgtattaaaataaacatataacttttaatcatcatattaaattgtatttaatataaatttatatacaatacatttttatataataaattatatatataaatgtatatataatagtttttcttttttgagatggagtctggctctgtctcccaggctggagtgcagtggcacgatctcagctcactgcagcctccgccttctgggttcaaacgattctcctacctcagcctcccgagtagctgggattacaggcgcctgccgccacgcccagctaatttttgtacttttttagtagagatggggtttcgccatgttggccaggctggtctcaaacacctgacttcaggtgatatgccgcctcggcctcccaaagtgctgggattacaggcatgagccaccatgcctggcctatatattttatataattatataaagttttctataataaattttatataataatatataaaatggatatttatttaagataaagttattagttttatatatttacatatatttaggaataaatgtgttactgtgggagcccagtgcccaggcaggtagtcagtacatgatggttgtcattagggttaatactttggaattctggattttttcccaagagagtgtctacgctggaatattgggcttgtggctttctgctgatgtgcatgtgtgaagaagctacttccacttattaggacttgtgtatctgtctcgcagtttcactacctattttctcgtgatgttggtcaagtcgcctaacttttctgtgcctcatttacctaatttgtagaatatgggtaacagtacacaagtgtgagtgtgtatttcccaggactgaccactagagggcgtgaaggcaccggcacttactattacagcaatgggtgtagtagtgctcatggtcgtaaacatcattctcccatgaaaggaaccagggcttcctgggagaaataactgattccagggctggggccggaaagcacaagcggagcctggagcatctcgtgaggccagaaagtaaggagccggctgaaaaataatggagatctgtcgaaaggtcacagatgccaaccagaaggagctttgaatgaccaattttgagacaaaatgagcactataagaaataatgatagtaataaattccaacccataaatacccatgagttcctactaatataaataaataattgaatacataaatatataaggatgaagaaacagctttttcttacagcagaattccaattaatgaatgtagaaggaatgatcaaatagaaaatcactatttggctaacagcacagtcaattgtttgtaggcaagaattatcaatggactttaaatatgaatgggtaaaagtatgatgatgctacaactagtgagtaccaagggggaaaaaaaagtacgttgagaagaaacaggctacttccatattcccaaagtatcacttcaggagctacttattgattataatgggacaaatagtaacttacagtagagaaacctggcaacagagtctctccgaggtacaaaggctctcttcaggaaggaggtaaggggaaggaagaagaaaacactgtcctgcctcaattatttgctttccccattctcaagtgtacttcatagacattcaaagatatgtgttgatagtgtccacgatccacatggctctattatagtcatttattcacacatacattcagtgaggctttgagtgcctaatgtgtgcctgatatttgctagatggtggatgctgagaagatcaggtgtgctgctgtctctagggtgactgaatccacctgccccactttacagatgtggaaattaaagtgaaaaggatttataggattagttcactgtcacaaggtcactagccttaaagttacaggagtaaagcaagtttcctgacttgctagattttctgctgcaggtgctgacaatggtgagctccaataggagagaggacactcagagtgaagtgggagccctgaacaccctggattagccaagaggacatgccgggtccagctgtgaccgcacaaaggaccattggggatatttgtattctctttttcacttagagcttgaaatgaggaaaactaagtgcagaaaaccaagagtggaagatttttcacaaagcactggtaacatgcatcagaaaaccctgtgctgatgtctgtcacggtgtttctcactgaacggtaatagtctggctttgagtgtgttccctctacagcctggagttctgcgaggcagggaccaggtgtgattcatctttgtctctccagtgacagtacacagcaggctctgataaatatttcttacaaaataaaatggaataaaaagtagacatctgcacaggtgtgggatgactgagcagcagcagaagcaggaaaagtcagcgtccccagatcagctgatgtggtgttcggattctagataggggtgaggtgccaggatggggatgggggtcctgtggctctgctgccctgggggacacccctaggtttcacagtgcctgctgtggttgctgcactttgcttccccatgggaaagtgatcagagggtgtggggcttcaggtgaccccatgtgggaaatggccaagggaaggtggggtgggcggcacatggttttttttaaccaatatttgaaggtaggttgtatgaaaaggtgttaggcttatttcagcttatggggagtaggacagggattggtgagtgtgtatcaggtatattttggctcaggatggaaaagaactgtcacagtaacataaggtcttttgggaaattacatgtttactggcagagttcaggccagggctgggtgtctgaaaatacctgtcagggtcacttttatggttacaagggcagagcttggcttggaaccaggtttcttactaataccacatattaagtattataaaaactgtcctttgcaataggacattgctctatgatgcaggttgaggtccctctgtttaagtaattgtgggtggctgtgattctctcatctagtctgcgacttggacttcacctccatctgcagtccctctcctttgctgttgacactggtcagagttaagcgcatttactgacgatggtcacagggtggcagcactgcctctctggtattttctaaaacctcttcctggaactgagccagtctaagaggatgtcatgactaagaaaagggcactaatgaggtgaacagataattttttttttcttgtttctcctgtgaagtaacagagtggaggtgagcatggaataattgccttttagaaatggaagacaatggagagaagtgtttcgcaaaccttaatgtgttcacagatcccacacagatctttttattcaatacagattctgatttttctggtgaggcctgagattgtgcatgtctaaggagcttttggatgatgccattgctgctggttggcggaccacactttgagtagcaaggctcgaagatcatttagaggttaattctcactgcatctaatttatggatgaaaacaaaccaaggtccagagagagcatatacagcttgcctaacaaagccattccctaagtgcctgacttcttgcatttaaacccagggcttcagcctttgtccagttctcactccacacatcacacggtttgttcactgttgtgaacgacagttgtggcagcatctctttagtttaggaatccagagccccaatttcactaccctctttggtcttggctcatgctgtgacttcgaatagttttgcccttacttaaaatcttcagtggctcttttgtaatcacaagatcaagttcgaatatctctgtctagtgttcatggctttataacatatggtatctctttagtaaccttacctaacttccctgttttaaaattgtctcttgctgccatagccctccttgctccttcctgctccctaacaaactgtgttcacttctctctcagtggtagtgatgatggcatggcctctgatgttagactcatgtaacttctaatcccagatccaccaccaacattggcaagttgattcatctttctgaggataagcatcctcctctgaaataaacttagatggcggttgagaggggtaaataaaataacacacaaacccactctcatccctgagaccctcttcaaaactagcatataaaaatagctatttgaagaggttcagtgaaattcaaggtaacacagagaaggaattcagaatcctatcagataaatttaatagactgaaataatttttaaaaatcaggcagaaattctgtagctgaaaaattcaattgacaaaccgaagaatgcactaaatctttcaacagcagaattgatcaagcagaagaaagaatttgtgagcttgaagagataatatatgaaaactcagagtcagagagacaaaagaaaaaagaattaaaagaataatgcatgcctacaaggtttgattattaagctactcaaagagatacaagagaagggtgaaaaccaacataaagaaatgtaaaaaacaatcagaatataaatgaaaaattttctaaaatgctagctagtttttttttgagacaggctcttactctcatcacccatgctggagtgaagtggcacagtcatggctcactgcaggctcaacttcctgggctcagatgattctcccacattagccttccaagtagctaggactaaaggcgtgtgccaccaggccaggctaattttttgtatttttagtagagatggggttttgccatcttacccagggctggtcttgaactcctgggctcaagtgatccaggagattcactgccaaaaaggatataaccaagtcatatagtcataggttatctaaagtcaatgtgaaggcaagaattctaagagcagtgagacaaaagcatcaattaacttataaaggaaaacctatcagtctaacaccagatttctcatcagaaaccttacaaaccagaaggtattggggtcctaatcttttggcttcttaaacagaatagctctcagccaagaatcttgtgtagagtgaaattatatttcaaaatgaaagagagaaatacagtctttttcaggcaagcaaatgcttcaggatttgtcacggctagaccatcctacatggaatgttaaagggacttctaaatcacaaaacaaaagatttaaatagaacagaatagaacctcttgaaaccaaaaaattcaaatggcctataaaacaataacacaataagaaaacaaagtagataacgatcaacatgatgactggaacaaatattaacattgaatgtaaatgacctaacactccacttaaaagacacagattggcaagataaataaaaaatcacaaaccaaatatcagctgtcttcaagagactcacttaacatgtaaggattcttatagactcaaggtaaagagatgataaaagatattccatgcaaatggaaaccataagtgagaaggaatagctatccttatatcatataaaacagactttaagcaacaacagtaagaaaaagacaaataaggcaactatataatgataaaaggatcaatcaaacaagaagatattacaatcctaaatatatatgcacctaactttggagctcccacattcataaaacggttatgatgagacctaagaaaaaagatcaacacaaaacagtgagggtgtcctgggttttctttttattggacagcagtgtactagcctatcactttcccagtcaggggatttttggtctccccattcccctaccatgggttcatgccaaagtccatattttttattagtgtttggaattggattttttttttttgaggtggagtctcgctctgttgcctaggctggagtgtagtggcacgatctcggctcactaacctctgcctcctgggttcaagcaattcttctgcctcagcctcctgagtacctgggactacaggtgcatgccaccacacccagctaatttttgtatttttagtagaaacgagatttcaccatattgtccaggcttgtatagaactcctgacctcatgtgacagggaaacaggcactcagtgaacttcatgcgattgaggagttaatgataatgagagaagggctgtgaggggacagcactggggacaccagagcctgtgacgggctgagttgctgtgccttgggagatgcccttttgactgagccctgggaaggagggggtgtgggggcaggagctgcctgcagagggagtggcctcaggtgggcggccacctggctgcagggaagaggtgacagagttcgtgtgcagagcttggagggtgaggaggaggtgggttgaggtgaccttggtgagggtgaaccatggggggctgtgggccctgctgagggaggccagccagccctggacctacagggtggtttggtcttttttgtcccattcccagcatccactgagtggtgaaactctgcaggccagggaccatcccactggccagaaggagcgcacagtaggtgcccactcagtgcatgttgggctggacagaacctcactctgccccctgcccccagctttgggagctgcagcaaggtccctccccctagggatctccatgcctctgtctctgaggggtgagatggggagacttcaaagggccatctcagagtgtgggggatagagacgcagaagtgtgggggatagagggaggcctgggctctagacccaaaggaccttacacacctcctgagtcttttcaaatggtttcttctgttactttaaaaatgatgtaagtcatcatatttattgtaaatcccaggaatctaatcatgcgtaaaataaggtgtcttatccttgaccccaccccttccccaattaaatttccaggatgttaccactgtttgcagttggtgtgaatctctctttaataatactctgtttatctcacttgtcgttttacgccaaaatacccattgaattatattattgctgaagaccattcttttttttttttttttttttgagatggattcttgctctgttgcccaggctggagtgcaatggtgtgatctcggctcactgcaacctctgcctcctgggttcaagtgattctcctgcctcagcctcctgagtttctgggattacaggtgcacaccaccacacctggctaatttttgtatttttagtaaagacagggtttcaccatgttggtcaggctggtctcgaactcctgacctcatgatccaccctccttggcctcccaaaatgctgggattacaggcatgagccaccacacctgcccagaccattctgttctactgaatcatgtgtggtgggcacctcttatatcaatacatatggattttatcttgtgtttgttattggctcccctttttctcattgcatggctacactcaatgctttgtccacacccctgttcctgggttggaatcttgtgacagaaaatgaagtaacaaaggctaaagctttctaaagtggagtcaggagattgcaagacaattgcactttcaccagcaagagctcaaaccacagaatgttccaatagatttggataaacagctgaagtcagtattcaccagccttcaacatctcaactaggagaaccctaaaattaactaagcacatagaatggaatggacttgtgatttaggattccttctcagccaatgagctgcttctgaaaacaactttttgtggaaattacctgtaaagaaaaccctctcctgtgcttgtcttacagaacactagtcagggctgccctgattcagtggacccgaattgctattatttgtttcctaaacatatggtattttctgtgaccttcatctcaatcttttttttaagttactgggctgtttcccagttttcataatgacgagacattctgcagtgtttcatacacatgtcttttccccatgtggagtattgatccaggagctcattcagtcaacgcatgtttatgaagcatcctgtgccaggctgtgggctggtcactgtcttcagcagagagaggacaggcacagtcttgccttcacagagctcacagctcagggaggctcttagaagtgggatactggtcggagcatgtgcacattaaacatgatgaggtcaaggttgctatagggactaaaccacagtcccaccaagatcgcattgagttcctgtggtagaccagaggtcagggcccctaagatgtcctgagcagctccctctgctcagaagttttggttccacaggtgacacacctgagcacaggtgacccctgcagaacctgtgattaccacccaaagccaagagtgagtggtgggtgttctaggaggaaccgtcacctccatgggcagggttggggaagactgaggggagcaggtggctgatgactttggccagaaggtagggggatgggcaggtgtgcgctcatagggaagggaagagaagggagggcattgcaggcaacaacacaaaggttggaacctgccttcatggactgagaaaagcagggagtccacccaggctgcagctggggagggaagacatggggagcagtgggtctaggggagaagcagactgcgattgaccttggggactgggcagtgagcagaggtgtgttatgtgtgtctgtccccatcatagatatgaggaggggtgaggccgcgggtggcacctgggtcggtgggatttcatagtgcctgctgttccctagagcctctctgtatagagggtcagaatagatctgaggctgtggtctgggggaaggggctggtggtgcttaccatctctaggggtgggaggagagggatgaggatgcccctgagcagtgaagcctcaaggtgtgtggagccacagttgtctctcattagacatgtgttttgcgtgaggatgccagggcctggtggttattactgttgtcaagtttgcatgacaaggacccaggtatccagggatccagagcacagggcccctggtgaggggatgaggctcagatggggctgaccaggttcatgtggtcagagtgggagggactgatggagagacagagcctcaacccctcctgtcaggagctgtggctatgtccaggagagatgacaaggatgacccaggacattgagtgagtcattgagacattgaaggtgaggacagggcagagaggaccctggtgactgctgaaatgtaggatgtgaggagggctctgacccatgcaagttacaggacctccccacccccgagcccacagatgacccttaaattgggcatcctgagtgctgtgtgtgcccagcagggacactggataggctggacctgagtctctgtaagggcagcgctggtctgtaggaccagagtcttctctgtgggtgtgacgtgggcaggaattagcaagatgggggtgacaaggcttggcttggaggatctggtacagaagcccatgggcttggtcagctcagcttctcaggggctcagctggggctggaggagcaggatgctgtgctcagggcatgctccaggcagcgtgatgtgtgtggttccagggtcaggcacgggggtcaaaaattaaccatgaaaagttcccaccttctgtaggcagagaaaatggcctgattgtcagggtcagggagacttaccatgtggccaaagcaggctctcagcctcccagagaccacaccctgggtgcagcactcagctctgcagggtatggcaatagatgtgccaagaaccccaacatccagatgcatgcaaaaattttgcgatatataaaatagagcagatcaagtttccctgcaataacgttgttcctggttgtgtctttttcttgtaaactagacatggacatctttccagcagtctgttctcatctgccaccttcctgctgcagcacctcagaatgaacattcctgagacactgtccgtggtgctgacgaccaagagctatggaacagagtgtgatgtagaatcttctagttacctctgctctcctttcacttttaacaacagagcatcattaacaatgagaaggtggagaggtgttcaggatcttgaagtgacttctgtcttgctctcccataaccctgaagctgctgtagacattattgcagaaactgacaccacagtcaggatggccttgtccaggagcccatgtgcagtttgtagtgagcaaggatgagaaaatggtcttgaaaggggtgatggacagaacaggggcttttcaaaaatgtcacatcatcacccccagcatccgtgaatctgtcacatggtaagagaccttacagattaaatgaaggattatgagtttggaagattattgtagtttatccagatgggtccaacataatcacagaatcccttccttacaaatgagagagggaggtgggagagtcagagaaggaggaggagatgtggggatagatgcagaagacagagcggtgtcaagatgctgcactgctggctttgaagatggagaaagaggacacagccaaggatgcaggaggcctctaggaggtggaaaaggagaggaaacgcactctgccctggagcctccagaaagaacgcagccatgtgggcaccttggttcaagtttctgtgtcacttagcttgtgggaatttgtcacagcctcaacaggaacctacagaggagtcaccttgtgtgcaggtgggatccagggtcatttacagctaaatcctgatgtaaatattgcaggttgcttttcctacttcctatctcatggccaacaaccctggacaatggcagaacacccttggaaaccacggctctgtgctttagtggagggaccagcttgtttgtgggaaggtagcacctggtccaagtgaacctacatgagatcgttactctccccagggccctcagggaagggctgagaacagctggcccaggtgtgtggaggagctgcaggtgaggcagggctggaggggcctgtgggtccaggtagaggggcagacaggttgtcccatcgccatgggagcctgcacgagctttaggttggggaaccctgctcctctgacctggacgctcctgtgtggagaggaggcttgctcagtgagatccacgccagggggtaaattgggaactgatgggaaatgaggggctagagtcctgggtagtgcctgggaggaccttgctcaaggactgaattcttggtctgttcccaccttggttactctgacaacccctctctgtgtcccacggggataaagatctcctgagcagtggccattgggacagaggagaacctggtggccagagctaagcatccaggatcctggatttggggacaggcaagctcattgctgggggacagtgatagatacggcctccagggcctgggtgaagagagcaggagggctcaggacactggaggctgtgtggaggtcacacccacgatctgtaccacccatggatgctcctgcattgctcacctttgtgtggacatcagatggccccaacttttgcactcctgagacatctcatgcattcacagagggacccaggctggggctgtgcatggccttggtctctagggtagtgtgaggacagctgagcactcagctggctgggcaggactcctgcgaatcctgccctttcctgtgtagggtccaccccagcctgactcctaaccccctactcctgtctttccagggaagagagactggggttgagataaggtggagatatttttcctgtgtgacccaggagagaatggacatggagtttcaggtgagtttctgctaagttcccatgagcagaaaaagagccaatgagaggaagtttcccctttattcagatcctttccaggtgaccccgggtgggccataggcccattcactttccctgcaagcccccgcttcctgtggtgatgggaagccttcgccttggcccacccagagcccggggcagtctgttgaggtctctatatattcagcagggacccccatcccttcctgtccccaggcctgtgtctcctcaggactcagagctggttctctggctcaggctccatgtccttccccatccccagggctgggggcttcagggacgctccatcaacccacaggagcagctcccagaggaacctaagaagccacatctgctttgtggtcgatccagcagtaaatgtttgtgtcagagtgtagcaattccagtaaaaacagagaagaggtcttgacccctgaggccttctcagaacagggtctggcatctctctctgggcccacccagggctactctgggactgaacctggctgtgctcagggggttcctgctcccaggcccctccctcctctgctcaccacctcctgttattttcactgcagtttcctgaacttcagctcagccagatgccagtggggacagatcctgggtctccctggggcccaagggaccagaatatctgtggcccccactcacctcatagatgagagcagctgccctggtgctgggtaggggaatctgggcaggggagagaggggtgtcaggggacagggaaggattcctgctgtgtaggaattccagggctctcctcaggtgatggagggtcccagggtggggttagcacagggagtggatgatcctggccctgaacagaggcccagctcatggccagggcaggtctaaccttatccaagtcattctgggtagggtgggtttgtgctggggattgacagtccccctgccctgagcctgcacagctggggccccagtggaaatgggattgggaacggacagtcttacctaggagatggagctgtcagagggtccatggcctggggacagagacaaaagtgagcacgagagtgttaggatagctgggcccctcctgcaagagtgtgtgggggtcctcagttcttagagaattggggagagggagcctttctcaggttattttaggggtcaagtaagcaagtgaggttgaggaagtgacccatgacccagagcccggaggttagggctgacccggccagttggggtttcctgtgtgatgttttatgggatcctctttgcagccccagggatagggtcagaggcccctgggtgtaactggcaggagtggacaacttggggctggcttagtagttcccagccacacccagactgaagggacactcaccgggggtggaggctgggggctgctgctccctgaagtcactctgatcgctggccctaggaaaggtcagggttatttgtgaaggtgcaaggttaaaagtcacaaattggagttaaaataggggaccaggaaaggagcctatttccaagaggggtatggagacctcctttctttatggagttctgtggtaggaggggcccaggtgaggggagttgaggaaaggccttacaaagccacatctgtcctggccagaggggaaggactctcaggcagatgctgggccaggagaacattgatccagtgacacaggaaagggactgaggacccagggaaggaatcagaccaccaggggttgcctgagaggaagggtcaaggcaccagggggaaagcagggccaggcacatgtgcaggacactgaggggactgcatgcatcttggattctcctggaactcagtgtccctgctgtgaccagacactccactcagggctggagatgctgaaatgggacaatgatcttgtcttctgtctctgccctttggcaagagacataaacgacattccaggatatgccatattggggccccggttctcccttctcacagctcagtgtctgcagttaccatgtcagtcaaaggggtgctgaccccacccagcccgtccaggctgttccagtctccactatgtgataatgcccaggatcccccctcagatgccctctcactgggtggatggattcagtgaacagggggaggtaccaggtattgagcaccgctcccccctgctccaggcagctgtggctttgctgtgctaggaaactaggaccatgctcaggggcatggccttaattggactgaattcactgaggacaaagctgttgaggaagcagcccagggtcagcagctggtgaggaaggtgccatggaatgagagggaaggatccctggggagtcgggaggctggggagagcctggcactgaatacaagacagggtctccttccttctcgcctggggtcagcgtgaaggatgggagcagaatggggaaaagctgtggtacctgccagtttttcggaggagcaggaaacacacaagtgcagccaccagaagactcccaaccaggaccccgatcaggatgcctagagtgttgtcatctgctgaaagaagaaggcaaaggggatgaggtccaaatctgttccagggggaaccatgaggggccttgcagggcaggggcatggtcagggaggaaggaaatgccatggagcctgagtgtggtctgttgtgctgtcctcatagctggctcccttgctctccgtggttgcaccattttctgtgtcttaggcttgaattactgggatgcatcaactcctacattctcccacaggaagcctgcacctcatcctgctcctgtgttttttagtccctccttcctctcacatcactcctcttccccctgtttctttttttccatcccatggcagtcgtaaagggcaggcccttgctgccaactcaatgctgatgagcagggatgatgttcattgactgttttcaggggccttccacatggaaggcacagtgggaatcaatctacctgcagcttttctcaccctcccattgccttgagggagaagggtatgtgatattgtgaaatacgtatttggtgttcatcaccattgatatggttaggctctgtatccccacccaaatctcaccttgaattgtaataatccccatgtgttatgggagggaccttgtgggaggtaattgaatcatgagggtgggttttttccatcctgttcttgtgatagtgaataagtctcaggagatcagatggtttcataaagggaagcttccctacacatgtcctcttgcctgctgccatgtaagacatgcctttcaccttccatcatgattgtgagacctctccagccatgtggaattgtgaatcaattaaacctctttcttcatacattaccaagtctcaggtatgtcttcattagcagtgtgagaatggactaatacagtaaattggtaccagctagtggagtgctgctataaagatacctgaaaatgtggaagtgactttggaactgggtaacaggcagaggttggaacagtttggagggctcagaagaagacacaggaaaaaagtttgaaacttcctagagacttgttgaatggttttgattaaaacgctgatagtgatatggacaataaagtccaagctgaggtggtctcagacagagatgaggaacttcttgggaactggaacaaaggtgactcttgttatactctagaaaagagattggtggtattttgcccctgccctagagatctgcagaactttgaacttgagggaaatgatttagggcaactggtggaaaaaaaattctaagcagcaaagtgttcaagatgtgacttgggtactgttaaaaacactcagttttatgtatttacaaaggtatggtttggaattggaacttatgtttaaaagggaagcagagcataaaagtttggaaaatttgcagcctgatgatgcaatagaaaagaaaaatccattttctgaggagaaattcaagccagctgcagaaatgtgcataaacaatgaagagcaaaatgttaatccccaagacaatggcaaaaatgtctccagggcatgtcagagaccttcctggaagccccttccatcacaggactggaggcctaggaggaaaaaatgtttcctgggccaggcccagggctcccctgctgtgtgcggcctagagacttggtgccctgcatcccagccactccagccatggctaaagagggccaaggtacagctggggccatggcttcagagggtgcaagccccaaaccttggcagcttccatgtggtgttgagcctgcaggtgcacagaagtcaaggattgaggtttgggaaccttcgcctagatttcagaggatgtatgaaaatgcttggatgtccaggtgaaagtttgctgcagaagcagagccctcatggagaacctctgctagggaagtgttgaagggaaatgtggggttggaaccccgacacagagtccctactggggcactgcctaatggagctgtgagaagaagaccacaatcctccagaccccagaatggtagatccactaacagcttgcaccatgcacctagaaaagctgcagacactcaacgccagcctatgaaagcagccaggagtggggctgtaccctgcaaagccacaggggtggagcccaaggctatgggagttcagctcttgcatcagtgtgacctggatgtgagacatggatacaaaggagatcatttcagagcattaagatttggctgccctgctggattttgggcttgcatggggcctgtagcccctttgttttggccagtttctcccatttggaatgggtgtatttacccagtgcctgtacacccattatatctaggaagtaactaagcttgcttttgattttacaggcttataggtggaagggacttgccttgtctcagatgaaactttggacttggacttttgggttaatgctggaatgagttaagactttggggaactgttggaaggcatgattagttttgaaatgtgaggacatgagatttgggaggggtcgggtggaatgacatggtttggctcttcttcacccaaatatcaccttgaattttaataatccccacgtgttgggggaaggacccagtgggaggtaactgaatcatgggggtggattcttcccatgctgttctcatgatagtgaataagtctcacaagatctgatggttttagaaaggggagttcctctacacatgccctcttgcctgccgccatgtaagacatgccttttgccttctgccatgatttcaaggcctccccagctatgtggaactgtaagtcaattaaacctcatttttaaaaaaattacccagtctcaggtatgtctttatcagcagccaagaccagctcggtcgcggagatcctaacccagcagtgctagaggaattaaagacacacatagaaatatagaggtgtgaagtgggaaatcagggttctcacaggcttcagagctgagagccccaaacagagatttacccacatatttaataacagcaaaccagtcattagcattgtttctatagatattaaattaactaaaagtatcccttatgggaaaccaagggatgggccgaattaaaggaataggttgggctagttaactgcaacaggaacacgcccttaagatgcagattgctcatgctattgtttgtggcttaagaacgcctttaagcggttttccaccctgggtgggacaggtattccttgccctcattcctgtaaacccataaccttccagcttgggcattagggccattatgaacatgttacagtgctgcagagattttgtttatgaccagttttggggccagtttatggccagattttggggggcttgctcccaacagactaatacacccattttctggtatgtgactctaaagtccttagaatcttcaaagtgatgtctttttcaagctaataattgactgatgactggcagcccctaggcaacttcagaatgaggctggtcactgacccaggtaggattagagggttgggactttcagcctcacccctaatccctggggagggacctggagtttgaattaatcaccaatgaccaatgaatcaattaatggccaatgattgaatcaattaatggccaatgattaaatcaatcatatctatgtcatgaaccccaaaaggactgggtttgaagagctgaacccatggaagtttctggagtgtggtgcatctggggagggcatggaagctccacaccccttcccacatgccatgctctgtgcatctcttcatctgcatcctttgtaaagtcctttattacaaaccggtaagcctaagtatgtgtttccctgagtcctgagagctgtttgagcaaactaatccaacccaaacagggagtcatggaaacctcaatgtgaagccagtcataagaagctctggaggcccagacttgtgactggtgggaaggtggtggcaattttgtgggactgagccctctgctgatatgtccaggtagatagtgtcaggatggaattggaggacacctagctgatgtacggtgcagaactgattggctgctgggtgtgtgggagaaacccccccgcatcacatttggtcacagaagtgtgtctgtgttgatgattgttattgtggagtgagagcagaggaaaaacacagtttgagtttttccaaacagggtggaatcccatctgccaatttagaatctgaaacttatagtttcagtacttcaattaagattgaagtacttcaattcagtacttcaattaagattcagtacttcaattaagattcagtacttcaattaagattacagaactggtaagtgaaagtgatacaacaaaaatgtaaccaaagtctgctcaacttaacagctaataacaacaaagttcataaaaataataccagtcgatattgatagcactgattgagccctggctctgtgcatgaccttgttaagggctttaatcgcattaatctctgaataaatatcctcacaaccaccctgagatccaggtgtttgtaacaattctacagatgaggaaactgaggcccaggaggttgagtgtcttgcccaaggtcaaatacctggtacctattgtaaccaggatgataactggatgagtctaatccctgagttcttacccacattgctccccaggctctgaaggaatctcatccttctcattccgtgtatcattttacaccccccctccctcctaggaaaatatacaaggaaaggagtgagaggggccgagggtcactcacattttacagtcagcttgagggggtcgctcctgttggagctgactgggttggagacctcacactgatactccccagcgtcctcctgcctgatggggtctatggtgagcatatggttaaaccaggacagcttcatcctcttcgtgacctgcagacgctggttgttgaaaatccactggaaagaggttccagtgttatttgtgtggcaggtcaggaccacggagcccttctctgtgactgtggtgctgctggcttggatggagggctgagccactgactctgtggatagagtgaccaacagaaagtgtcttggggccatgctgcatcctcagagatctcagagtcaaatttagaacattctcctgtgaataaaggagaaagatgaaggacagggaggagcagagagaaccagagacacccatagcagcgagcagtagggactacagtgacctcagagaccccagggaccaggaggacccagctgcctcagaccaggaccagggagccctgaaaaccctcccacagatgagcggccccagagtcacatgagatgcaatacctggggtggctttaggagcaggcagtcagagaaatggaacatgggtctcagcccctaagggacaaggaagaggtgtggccagctcctcctaggatcctacatccaggacccagtctgtaaagaggttatgattattcctttcttttttcattaattccctccctccttcatcagagaactactgagtgtgtgtctcagttgggccttgtgcaggtacagggtgtagtgggaagagaaagctgagtcctttccttcatcctcccatgggagtgacatcaacaaatcaagaaattcatgatttcacgtccagtgagggaagaaatgtggatctgatgggagaggcttggacaatcctggcattgagtctgatagttgagacaggtgatttcgttctaagtaaaaactgactaattctccatttgcccgtcattcctcagaccagaatctccctctctgagctgaggatgcccaagaagaaaggagctgaaccaacatctggtcctggggtccacagatgccccacggtggtggccacgaccagattctgggctgcagacacacggtggtgtgacgttgagcactgacagcctgtgtgatgctgatgcaatttctctttaataaaatggggtaaatgtcaatggtccctggcttgccatcctctctgtaaattaacattaaaatatttacaattacctgacctaaagcttggcacagaatagctccaaataaacatcatctattattattttactccaaaaaaaaaaaaaaaagagttctctgggcctgattcctggtggagaaggagcggtccagagtgtcttttctctgctttccctcctcctgaggacagtgcacttcccgggacatcttttaagtttcccatccagtttaatggcctgggaagtttgtttgtctgtcctctccactctgactctcaggtgaaagatgaggctctgcccttgcccagatggggctctgggggctgagccctgcctggtgaccagctctaggaaccacggccctgggacagctggtaaatcgttgctcacaatcagccctgcccaggaagccacaacccagccctggcacaggctccccagggtcatctggagtcaggatcttgggacaggggcctggggcaggggcttgaagggctgagcttctctcagaggatcctcaggccaggccctgactgagtcctataagatctttctcaggtcatgtctatgaggaggaggccaagcggggttggactgagactgattttcccccgctgcatctcccgcatcagactatccttcttgctgtagggaatttccacggagtccggataagggaaaggaattctgatctgttatagtttgtctcccctgggtgtgtcctgcactaaatgcccaaaccccaacatgggacgtaatgcagagggggatgcaggcacagcccaggcctgacaatcctgcgtatgtgaagcagaactgacccccaacacccagaggcacggaggaatcactcaccgtatacacggagatggtgagatgcctgttcaatctgagaatttctgtatgtgacttgtagggtgtagtatcccgtgtcctctagggtgacgttctggaaatgcagatctccactgggtgatattgtctctcgaccgctgtatgcaggccctggagtcctaacgtgagtgtctattacatatgctgcgattagctggttgggctccaccgttttccctttgtaccagccatagctgtaaagattctcgggcagataaaccacagagagatgaacattctccccttcagcaacttcaaagggcgctgatgcaataaagagccaggcagtggtgggtgcgttccagaaagttaaaagtgaggctaggaaagggagagaatatcagtcaatatttgacctatgcattggcatggaaagacggggtcctgggtgcaggtctcttcacccctcagccttagagggtgtgtgtgtgtgtgtgtgtcctactgggtcaaagtcagcagcatgaccctcattccttcagtacctctgaccttggcatttccttgtgtgaaccctctttcccaggggtctgcatggttccctccccactgccttcagttcctactcacacaagggaatccctgggagacttctttcgtgaagcctcctctagagaccctgggtcttccctttctgacctttcccagctctgttccctccagggctcttgtcagcacctgacctcacattctagatctctttgggtgtctgtcttcccccccatgagattgtgagctctgtgagggcatggacttgagtgatgttagttgcaccccagtgcctgggacaggctgcagactcctgtggatgagttcatgagcgttcccagggccttccatatcctggggtttatttgctaatgtctgaggttggcagatgaagacagagtttcatgccctggtggtgtttttatttaaattgtcactgtgatatagttttactatcattttcaaaatgtagtggccactgacaatgaacttgaaaacatggaccaactgagattgttttgccccttggcaattccagttcacttagattttttggttctccttagacgctctctcccctgagtctctaacaaaagccctctgtctcctctcagagccccatcctccccaggagaccccagccagtctctgtgctccctcctcccacccactcccagggagtcctcccctcacctgtgagcaagagcccctgccaggggatgcattctctgtggggacaagctgaggggggccccatggtctctgctgcctgctctgtcctcctctgtggagaggagcttgggctccaggaacgctctagacagggttactgtgactgttgtctctgctgtccttccttcctctatgctgagcttcctctcaggcaggagcacttcccgtttatgggcaagggcggggctctgcctacaatgtctctctgtcccctcccctctcagtcctgcctcccttgtccctcctttctccttcctttttgcctatatttggttccctaggcaaaactttgagaagcaacgctgatggggtcctcataacaggacgacccactctccccagtactgacctctgctgtgttctggccttggttctgtcacagccggtagattatttccctttgtgacacacaaaaccagctgggccctgggtctcctcatgctctccagtgctccaggaaggcagaatgatgcccagcaggaaagtgacagaggtggctctgggggctagaaaggggctcactgggtgatggctgggaaggacccacccgctatcttcagtgtcaccagcctggcctctgacccagggacagagacccaggcctggaggtctcgggaggatccccagctcctaggtgtggagggaggtgtcctgtgtgtcctgggaagagaggactttgatggaaggaggtgggaggctctgggttctgctgtccttggtgaaggtttcagggggaccctctccatgtctggggtctgtgcccccagcttaactctcattctctttgcaaatacatatattttgtggatctgcagttgcctgaactgtctcatgtccctaaatctttgtatccctttttacagaaggtcaggaagggtgtgtacatgagtatgaggactatctgatcagggcgagtgtttgtttcccaaagatctctttagatatggtataatacataagataaatgtactgaattagcaattttaagtgtagaattaaatgatactaattctattcacaatgttgtacaaccatcaccataattttttaccagaaaatcttcattataccaaatggaaacttcatacttttaatcaataactccccacttccccctgccccacccactggtagcctctgatactatcaatctctgtgaatttgcctagtttacatgtctcatataataaggaattatatacgtgtattatttttttctggattatttctcttagggtaacacttttaagattcatccacgtcgtagcatatattacagcttctttcctatttatggctgagtaatatcccaatatatgtttatacctcaattttaattcattcatctcttaatggacatgtgggtggtttccacatttttgctattgtgaaaaccgctgcaatgaacttacacttggaagtatctgtttgggtttctgtgttcatttctttgggggtacatataggagtataaatatggggtcatgtggtagttctatgtttaagtttttgagaaacagccaaactgttttccagtttgctgtgctattttatattcccatcagcaatatacgagggttccattttctctacattcttgtaaacacttactatttaatattttttaaaacttatagccattctagtaggtgtgaagtgatagctcattgcagttttgattttcatttccctggtggctgatgaagttgagcattttttcatgtatttactgacaattttaatattttttagagaactatttattcaaatcatttgctgtttaaaaaaaatgggttatctttttattattcagttgtaatagttctttatatattttagatacaagtcccttatggggtacatgatttgcaaaatttttctcatattctgtgtcttctcactttcttcatggtgttctttgaagcacaaacatttttaactttgatgaagttcacttatctatttttaattttgttacttatgctcttgatgtcatattgaagaaaccattgcccaatccaagatcattaagttttactcctatatgttcttctaatggtttgataagttttgctattccatttaggtttttgaaacattttgagttaacttttgtatgggctgtgaggtaggggtctaactacactatctcgcatgtggttatccagttgttccagcacaatatgaagaggctaccattctttccccattgaggaatcttggcacccatgtcaaaaaccaatgggctgtaatggtgagggtttatttctggactcttgattctattccattgatctctatgtgcattcttgtgccagaagcacactgttttaatgattgtagtgttttagtaagttttcaaattaggaagtgagtcctccaatttttttttccagattgttttggccattctggggtgacttttaaaaaagatgtagttcaatggttctcaaagcaggagtggttcagctctccttttttggcagtctggagacctttttaggaccttaatctaagtagataaattattcccactttcttttctgagttgctatgttacagtgtatattgacacccatgaaataattgagagaccctggaagtgcttgcctacatagtgagggacaattagttccatgatcatgggcacagaagattttgttttgggaaacaattttgttggtggagttatattcatgcttactcttttatttgtcttcatagcctgcatctccttcagacttcatatctgtttattttcttgtttgtcctctggggtttgggtgttgggtgaccagtcagctggagctggaggaggtgcttagcaaggcagtgaccctggttgggaggagcagggctcagcagggtgaaagtagctgggccttgagtcaggagtggcatctggaaggcctgactgtaagggtcagaagggccagcaggtgggtgtcctaggcacaaacggtggctgctgctgtggactggaggaaggtaagaggccccgagtattccatgttcttactggctccccaactgaggattcctctcctgggctggtgctgtcctgcagcagggaggggttagacagggacggctgcacatcaggccggagtccatgtcatcctcttaggcactgtcactacagattgaggattctgttcataagccaagcctttgcacaaggaagggacccgggctctcaaggaagagcagctcctggtcagacctccatctccttctctctcattgcctgaggcctcaagcttggtctacctggcacaggggtctggatcctcctcccagggttggggtcttactgagctgggcacctgcaggtgggagaagatctggaggggccccatctgccttcaccagattgatgttgagggtccctgagtcctgcaccactatcaggtgctgagcaacttccagtgtcagtgacaaccaccccatggtggaagcagaaccacctcgtgagaaagcacctccaagcctcagtgcttgccatgtgtgggaatttgctggtttcagttgggggcatgttggtgggtggtcatgaattcagggccggattctatgctcacagtgcacatgctggatgtggtacagaccccaggcagggctcagtggggtggttttgggtgtgcacaggtatcttttctggaggagctggtggtgatttggctcccagaagttcctgagctctgcagactcaccaagcactcaatatttgagtgaacattgggcgagagagcagaaggtaagtgtcagggcatcggggttggtgcctctgggaagaggaggaacattctgggaacaaagctctcccccggcttacagggagcttcccatcgctcctgccttgaggatcagggaaactagggcctctgctcttccaggggctgcttgcaggcagtttgctctgggagggggtgacccaggagttgcctctcattttgcatttgagatttaaaaggagaagggacagtatatcttgccaggtcacaaaaattacaggcatcatattgactgaagggcactcctgtcatcactgcaatataccagaatggtcttttaaaaaaataagtgatttaggtttaccagcaactgtaatgcttgttttattcttctagttcaccgttaatgtcacttttgtagttttagcactggcaatgttgattttatgttgactctgatgattttaagctttcatttgttcacatagagatcatcttctttctgaatattaatgcattttttctctatttctactggttattcctgtacatagagtagagaatcacttttcccaaggaggtggaaagcttctgactaccaaaaaaaaaaaaaagtgtcaaaatgctttaaagtcagtaacttaaagatcaaatccaagagtgggcaacagattctgcccagggtctgaaaggtggagaggtgactggtgaggatgtttaaaagacctctcctctctactccctaaatgggggccatccagtgttcttgaggttcagagaaggcccagggctggggcagcagggcactgtcagctcccagctcccaggggccaggagtaagaccccaacactgtccagacactgattgcattcattttgggggagagtagattcttatttaaagaataatacaaaagtctacaaatatgaacataaacagaaattcctttgctacaattttccccttaataagacattccttcctaatgacatatgtgactgcattcatggctgagatgttttctaggatggtgagagcatcagagtggactatctggtgccttggggtcatgcattttcttcttccaatgtctacaggatcccccatgtcccactttgtagtgtaactcagtgtgtgtcattctggtttttgttgtatagatccttggaaagcccatgtcattcctgctgtgaggtacaggcagccaaatggcatcatctctaaacatgccttctcctggtacatcaaattatggaataaatgaaagccattttgacagatattgaagatataagtttctactcttcccacacatgcttctcccaagtgaaggattttactggtgaattgttattagagattagtgtggatcagtgactctgccaggggaaattttgccctctaggggacatttggcaaagtctggaaacattgttggttgtcagagctgggggagggagtcctgctggcattgagtgggtggatggtgctgaacaccctgcagttcacagagccccaccagtttgaccacccaaatgtcaatgctgaggagtggagagccctgctgtgccctcccgcagcttccctgaagcttcccctcacctgctcctcccatgtctccccaccacttccccacttcacccgcctccttacacctcagtcccctccacctgaactcaccccttagtccaaggccagccctgatctccgctctcctggtctccttgctccttagcaggaggcgcccactagatggcgcccttgcccttactggagctcaccgtctccctttccaccctgagacaaatgtggctgcttttactgccacaaccccagccctccacactctagatttgctcagggagcagctcctggacagacctcagggaccccagggaggagcctcactctggagattttgatggcatggtctttgaacttcactgttacccccagtcaggatccaggatgttgggagtgcatgattctgcccggtcccacttcagcaggaccccactgctgagttgtctgtggggacccgggcctctcatctccttcttgcattgcaggagagggatcttagcactgctttcacataaagtcagataatggaggagtgcaggtgagtttgggaaggtggacatgaagagaggttgtgtccctagaggtggcagcagtgagaggatgggcaggtgggaggaacacagcccatccagggttgccagccatattaggagcgacagcctttcctctaagcctccagcctttttcctgaaacattccagaactttccacttcagcacttcccactgaggctcctcaggtctgtccctgagctcccagctgagcctacctacccatctgaaatcctgagtcctgtgtcaccctcgttccccattattctgtgcagttctgtgggacgcccagctctcctgacacccccagtcttcagaatggccatcagcgctgtcgctgtggcaccagggtgactgccgcctggaggctgagtcctggcttcctgacagctgtggggcccgctctaggctcccttgtcctgatcattcatcacctccaggatgcacagcagctgggccagggggaggagcagggacaggtgtcagccaccctgtgtgtctgcaagtcaggctgggggtgtgggaggacgccaggaatgactgaactttctgatttagagggtgagagcttgcactgatggaatttgggatttaataggaaaagcatagcgttttcctattttgtaggcagggtggctggagtttggaatcatagattcccctgggatgtcactgtggacctcagtcccacccgttaggggcacagatttcagaatccacaccctggggcaaagcaggcatgggaggctccatcagcctggccagggctctctatttgtgcagctgctgcaaggagatgtgcactctgatgggaacagtgctccctcctccttggggggcagtatctagctccctgcagcccctctccctgcaggccctgccctctctgaacctcaccttccccaacccgccccccgcaatcccatctcagctgtaatcccaacactttctcatccattatgggtggactgcttgagcccaggggttcaagactatgctggctggacaatatagcgagttgttgtctctacaaaaagacaaaaattagctgtgcatggtggcatacacctgtagtcccagtcactcaggaggctgaggtgggaggattgcttgagctggggaggctgagttggcagtgagttgagattgtgccactgtatacttcagtgtaggtaacagagcgagaccctgtctcaaaaaataaaagtaaaaaaaaaaaaagaaatatggaatacattattgttaactctaatcaaccatgctatgcaatagtccaccagtaataccagtaatagccaataatgaattatctgaaaaagaatacaatttattcttagctatctactgctaaaatttttaagctatcttttatgatagctgaaacaaaagaagtaaatttaaccaaggaagtaaaagacctttataatgaaaactgtaaaacattgatgaaataaattgaaaaagacacacgcacaaatagaagatattccatgttcatgaattggaagaactgatattgctaaaatgtccttaccacccaaagtggtctacagattcaatgcaatttctgtcaaaacaccaatgatattcttcgaagaagtagaagatcctaaaattagaaaccacaaaaattcctaaaacctgcacaaaacaccctgagttgccaaagcaatcttaaacaaatagaacaaagctagtggcattacacttcctgacaatcaaagcatactgcaaagctatagtaaccaaatcagcatggtcctggcataaaaacaagcacatagatcaatgaaacagaataaaaatcccagaaataaacccatgcatctctagctaactgattttcagccaaggagccacatgcacacaatggggaaaggacagcctcttcaataagtggtgctggggaattggatattcatatgcagaagaatgaacctagaccctatccctcaccatgcacaaaaaattaactcaaaatgtattaaataaagacttaaatgtaagaactgaaactatgaaactactagaagaaaatatagggggaaaatccatgacattggtctaggcaaagagtttttggataaaatctcaacagcataagcaacaaaaccaaatataaacaaacgggatttcatcaaactaaaaagcttttatacagcaaagaaaaaaaaggccagcagagcaaagagacaacctacaaatgggaggagaatatatttgtaaatatatacatatatatttgtaaatatatacatctgataagaagataatatccaaaatatataagaaaattatgtttctgtatagttttatctgactgggatacagaggccacatccacagtcccatcctcaaaggccacttgttcccaaaatgtcaagcacatccctcaatgatccatcatcaacacctatgtctgtaggatgaagggtgaatcatgaagcactaaaaaggaagaaggaagccaatcccaaaacaaaatgatgcagggtctggaaagtccaaagcattttttttttttttttactgcatcttcctcctttcttctccacattcccaatcctcactattgattaacaaaacaaaaaaaactgggacccaccatcttccctactgtcaggagatctagcgagattgtttgagtcttagaccaaactttgccataagccaaatttctggctgactttacaatgatatgagctagcacagtctctttttctgccagtcaacttgtgctcggttttatttgcaaccaaatagaggtggtaaccaaatataggtgaccctaaaattagtcatcaggatgaaatcctaaaatgtgcaacaaactgggttgaattcaggattagtagcaacatctctgttgtgggcttgaaaagggggcacccttttatgcagtagcaaaattgctaaattgttgtttgctgagtctttggactctcatcccggattttctatgaccattcaaacagggctgcaatgaacatctatggttgtttagcttggcacacttctacatttctatatagtaatatctagaagtgcatttgctcaatcacaagatatgcacattttataattgactgctatcgaactaccttaaatagccttaatttgttctcaacattgtttaacagggtctgtttaatgtcctacgtccagcaaggacagtatcacttttcttaatatttttcaaattattggaccttaacaaatacttaatgtgcaattaattgattcctttgtattcccatgccttcttttatatgtttccttatagtacacaaaaccacattattgtttctttacttgtgtcattccaccctggaccattcctatctaaactataacattatgagagagagagagagagaaaacaatatgaaaatataaattgattaatcaaaaaaatttaaataggacaaatcaggaagacacaagagagattttaaaattattcagagaataccacaatagctgtaccaatatattttaaaacttagatgaaacggacaactatctcgataaatgtaaattaccaaaactgactcatgaaaaaatggatattatgaatagagcaataatcagtaaagcaattaaaaagacagttgataatttttatttactgacaacaataacaaaatttcaggtcctgatatttttatggtgaattttaacaaattttcaagctcctcctcaaccaattctcagaaggtttaaaactttaacaagaaaacactttctaacacattttcagaagctgttatagcatgataccaaaaccacacaagaaaattatagaccaatctcacttacaaatatacatgcaaaatcaaacaaaatcttagtgaaccaaattcagaattaataatagcaaacaagcaaaatatgttatcatacgtatggcttatatcaggaatgcaagtatgtttcaacatcagaaaatacttctccacattaacagactaaaggagaaaaacgcttgtttaattatctcaataggtttttagagaattttgaaaattttataaagttatgcgtattctgtaaaattgatgaaatccaaccttgatttatttttaaaaattgcctttcctatagaattataggtaaaggaaacacatgcatcctcacagagctacttcaaggctaagttacttcccataagtaacgtatcctgtaatgtgtgcttggcacatattcaatactaaacaaatatttgcaaatcctcaaaccacttctcgctcaaataacccacctttgtcttttgcctttatgttagggttgattttctcaattgtatcttggagatcctttggtgggtctttcagcaattaccctgaatttgcttttctgtttacaattttaattcctgggaactctttcttgttctctgactgcacccttttcatgagagttcagccatcaatcctccagaaccccaccccccccgcccccccaaaaagcaataaagatgtctaaaagcttccttctgggctttcgaatgatgtttaccccaggcatttgttctattcgttcatcacccattttccctacaacttgcctacacttgatatcagatttttatttattagtcacctatcttcttcattggcccattttcctattttgccactggttgttctcaaatgtgttatgattcctggttgtacagtcaagtggttgataatcttggatatacgataaagatttgctctgtagctgtgtgtaagcctatataaaagcttttgtatttttcttcttaaaaaagacaaaagatggttgggaagatccctccagttcaccagttcgaggctgcagtgagctatgatagcgccgctgctctagcctgtctgtctgtgaaaaacaaggggggcggggggcgggggggaagactggagatgtaaatctcccgcagggccctacccgtatccgcaacaggtctctaacaggaacagcctcaggcctgtgttggaacaaggtaggttacagaaatctggaagccagatctgtaacttcagggtaaggactggctctcagggctgatcccccgggctgggtgtcccagaggcacccgcccccgccccttccccaaggcaggccaggacaccttcactcctctccttaggctccccacccccttctcctccccactgtgcctcctggagtagcggtggcggtgccacaggggagcggggcggggcgggctctgagggcaagggggatgggccccgccggggtcactggcggccaccctggaaactcgacgcaggccggcccttctagtgaatcgtcccagccacagctggcctcccagccgcgcttggggcgcctcggggcgcgaatggtgcaggttggggagactcaccacgcaccgtcgggggtcggtccggttattcctcaccgctcggctccagtgggcgcgcgggcctctcctcctcagttcctgcgctgcagtccctccctcacccttcgcagcttgggaatccaactgtgtcattccgacggagcgccgtgaggacctccgagggtgttagcgccaagtgatctctgtccagcgctctgaatatccaagtaaaggagttcaatgaagggcgggtcaacggaggagaaaccgtgactctctcaagggagcccaaggcctccttgtctaattagtgacgcgccaatggatggaggctcttcccaccatctcttcccagcatccagtgacaccaccgccaagggacgggctcggcggaacctgcaggaaagaagcatcggctgagcctgactgcagcgctgtgaagagacaggggaggggatcagtagttggtcccgcgcccaccccctgtttccgcgaggggcggagttgactggccatgcaggcagagggcgaaatgtgaaattccactactcctaccgtttttccctgacccgatggggcggagtgtcgtcaggctaagttccctggcggtaaggtggggagattgaggcgcacacctgccgaacggtaacgcaggattagctaaggcgagctcaggacagaagcctcccgaggagcaggagggcaaaataataaataaataaataaataataaataactcactccttggtctttatttgcggcaggaattcagaaggtgaaagcggggccttaggatctttctgaccttttgggttttaagcaggaggtgtcagaaatgttaccacagggctagctggcttgtggccagcaagcgttcacaatgccctcgatttttcatccctctctgtgggttctttttttcattgtaaggcagaatttctacgattgctcacccactcagagaacctgagctggtttagaccaggtgagacaggctaggtttaccctggtgatgatgtgttgttgccatggcgatcctgcccagtaccagaggccctgcagattcagatgcttggtgcctgtgcttggctgaggggccaatgggtgaagctgccatctgcgggatgatgactgaagcctctaagtcagaatccgcccaggctgagccttagggcagctccatggagcctcggctggcctgggatagagagtccaccactgtgccagcccccagccactgcctaggtcctgtgctgagagccccttgtccagggaaatggcgtccagtggaaaagggaccacccccttgcccttcactcaaggcaggttggtgacaaccctgaagctaatccgttcctagaggagctgcttctgggtccgagttttctctgcagcagagcagctccctggatgggatctgttcaaagtccgcctttcacgcggaattttccgtccttgcaattttccacctccaccactaggggatcctctctgaccgcctcatgccggctctggcctctgagcaggggtttctcttctgcatgtgcgaccttgcgcatgcctagtggccttttgggacctagagctgctccacaccccgatggggttacagagtgcctcgcctccactccaccccaccagggttccttccctggctgggatgggatttcagaagcgccgaggaacagcccagacaggtgtgggagagtagccaaggcccctgtcccggggtggccaggacagcggtggcctcgcataggacctggctgggctgctgcaatcagtgtcctgccccttggagagcaacagtgaaaacaacaagactatcttcacccaccttaagaaagaacagaaccagtatccccaactctgctgtgtatcccaacccaattccattccccaccccactctcagtagccaatatgcaaaatattagaatactcttactgttattattttcaaccacactctgcatcctgaaaaaccatatatttcgttatgtgcttttaaacttcttgaaaatgaaatactgaggctgggcgcagtggctgacacctgtaatcccagcacttcgggaggcggaggcaggcggatcacgaggtcaggagatcgagaccatcctggctaacacagtgaaaccccatctctactaaaaatacaaaaaattagccgggcgtggtggcgggcgcctgtagtcccagctacttgggaggctgaggcaggagaacggcgtgaacccgggaggtggagcttgcactgagccgagatcgcgccactgcactccagcctgggcgacagcgccagactctgtctccaaaaaaaaaaagaaaaaagaaatactgaattttcaaatacttgctttttttttcggtcaaaattatgttctcaaatttcactcctgtagatgtgcgtggctggctgtagtttttgcatttttattattaggtattctcctgttgcattaatatgccacattttatttctctcatgtttttggtgaccacttggggtgttttttggttttgtatttttgctgtatacatgctgccatggtggacatacctctttatacatatttcctgttgtatgcagacacaattttaggatgtgacatcttcagcttttctattgtgtcgtgtgtcttttccttcgtgctttgtgttatttacatattctggacacagattctttgtcaactgtatgtgctgcacatctctttcccagtttgtgtcttcttcttcttttttttttcttaaaaaaaactttctttatagtgttttttttttctttctttctttgttttgttttgtttttttgagatggagtcttgctctgtcacctaggctgaagtgcactggccgatctcggctcactgcaacctccgtctcctgggttcaagtgattctcctgcctcagcttcccaagtagctgggattacaggtgcctgtcaccacacccagctaatttttgtatttttagtacagatggggtttcaccatgtttgtcaggctggtctcgaactcctgacctcaggtgatccaccctctttggcctcccaaagtgttgggattacaggcgtgagccacagcacctggcctgtgttctttcttaagtagatgttacttttaatataatagaatgtatcatattttgcttttatattagtactttttctatctaattcaaacacatccccaagggtctttgtgtgtagactgaccaatttctcaagaatcatgaatgaatactgcttctctttccccaatttatctgtaatgctacctttattataaagtttctatgcatgtgtagaaatagttcctgatttttcactctgtgccaccagcataccaatagcacgctgtcttaaatattaaatagcagagctttatgagacaacttgatgtgcagtaggcaattgcccccttgttactcttcttcagggttctttgttgtaccacatgaattttagaattggcttgtccagctaaaagacaactgcaaggattttatttggaagttcataattctatacataatttggggaaagtattttcataataccaagtcttcctattaatgaacacagactctctctctctctcccccacccccacctgtttagttatttatatctttatggtctgttagttattgtttattgtctttcaaccaggtttcatgtttttctacatagaggccttgcatgtgaaagtctttcttcctagcttgctattacaaattttttttaattgcactttttgggtacagtggcttgtactgtaatccccgatacctgggaggctgaggcagatggattgcttgagtccagaagttcaagaccagcctgggcaacataatgaggtccctgtctcaaaaagtttgttttaaaaattgcatttgctgttattcaacaaatgtcattgtgtctcatatatggatttttatatctgataaccttgttcaacaatcttttgattctaacaatatatcagattcttttgagttttccatatagacaataatgtcatctgtaaattataattgtttcttctttgttatttcttggaccttttattttatatttttgtcttgctgcaaggcaatatccctctatatattgtggggtcttttttctcataaagtggggatggtgaacacccttgtcttgctctctgattgtataaagcatgctttctgtagcattttgtagacgctcttttttagattgaggtaattcacttttatttctggtttactgagtttttagcataaattcaggctgaatttgagctaaagctttttctggagacatcatttgaaaaattcatatgatttactttctttaagtcaccaaagttatgatttacattgaactgagtttctactgtttaactgtattcttgggagaaaacccacttgtcactgaacaatatctgttttatttactgctgtcttgtgtctaaattttcttttaggattttttgtatatgctcagattagcctgttattctcctttctgtatttttttctggtttgggggtcaaagttataatagcctcacaataagagctaagaaaccagccctaatggaggccggggcaggaggtttggagttcaagaccagtctgggcaaaatagtgagacccccatctctatgaaaaatagaaattagccaggcatggcagtgagtacctgtagtcctaggtacttgggagggtgaggcaggaggattgcttgagcctaggaatttgaggctgcagcgaactatgattgtgccactgtactccagcctggatgacagagcgagaccctgtctcaaaagaaaaaaaaagaagaaataaaaaggaaaagataaaagagctaagcatctgtttccttttttccattttctgggagagtatgtgtaagactgtaattaactgtttcttgaataatgggagaactctgtaaaataatctggctttggtgttacctgtattggaaggatgaaaaataccaattcagtttcattattggttgatagggctactcatgctttttgttttgttttgttttgttttgtttttgagaggaagtctctctgtattgccctgttgtccaggctgagatgcaacgttgttcacaggcctgatcctggctcactacagcttctaacttccgatctcaatagatcctcccgcctcagccttcccagtagctaggactacaagcatgcagcatcacatccagcctcttttcctgcctgacccagttctggtttcctttagttttctaggtgttcatccattttatctaatgtttaatgcatttggcataagggtgctcagtgtcctttcattgtctgttgtctgtaactgttgccattttcattcctatttatgagtactggcgtcttctctcactttttcttaataatcctgctggaactttgctttttaaagaacatcttttgacttgttgattcttttttcatacatattaactattttcttattttttgcctttatatttatttcttttcctgtttgaaacattgctcttttcttactataaaaatgggtaagtagctcatgaattaccacctcttttaaaaatcttttctactgtaagcattttagcagtttacatttgcccacaagtaccacttcagctacaccctatgtgcttttacataaagtcttcatttttggtaagacatattctcaaattttaattatcacttgtttttaaatccatgatgttttatttgaaatgttgtttctaaagatacattttctggttatacttttattcttctaatttagcacagtggccacaaaacatggtctgtgcagtgcatacaatcgatgagtaatttctgagctgtagtatttggcataatatatggcaaaatttcctaagttttccatgtgtgctttaaaaaacttccagtaaaatacataaatctgttagatcaagcttctcacattgttcaaatagtctatatgtttactgattcatttgactgcttgatttatcaattacaggtaggaatgtattcaaatctcctattaaagtgtgacactcaagtggctttttaaagacagagatgccaaaccaatgaatacatgattttccccaaagcctgcacaaattctctaatgaaattttaccatgaaagtttgtttaattaaggcttactaaagcagtatgttgtcttttactttttaaacagagaatatatattttaatacatcgtttaagtttatgattaattatctattactgaggataagaatctttgcctgtgctcattcagcatttgcacttcatttatgatctgccttctcatagcttctgttaatttttatactagagacatttatttgtttgtataaatgttgaaggtttttttttgttgttgttgtttttgagtcagagcctcgctctgtcacccaggctggagtgcagtggcatgatctcggctcactgcagcctccatctcctgggttaaagtgattctcctgcctcagcctccagagtagctgggactacaggcatgtgccaccaagcaaggctaatattttgtatttttagtagagatggggtttcgtcctgttagccagggtggtctcgatctcctgacctcatgatctacctgcctcggcctcccaaagtgctaggattacaggtgtgagccaccgtgcccagctgggttttttatattataaggagatgtaatagatagatagatgtttcaaagatagtcaaatgtttttaaaatttaaaacacttttttacaggttgactttcaccatttaatttcatctatgtgttttgccttagagaaattttaaatgctatgtagatctcatgacttataattatgaagcattttgttttctgttttccacgaaacttagcttaactttgagcatataatagttgtaaaggtaggagagtaacactgaaaaaaggaattgcataaaaatggcacattttctgtagagttgtttatcgcctgaaaataggccccatttcatggaagtaagatgatcaggctcaggtccccagacgaaactcttggcatggtttttggagatagtccagggctcagtactggctctatcatttgctacttctcccaaagtaaccaatatctcatccaccctgagcccatttccatatctctaacatgaggataatagcatctaccttacacaccaagtagagggatcaaatgtaggaactaaatcaaagtaccagcactgaataacctacatcctcccacttcccaaaaggaagagagatgtatcccctgttgacaaacgagaccattttgcaggagagaaaggaaatgccagttcacttgcaatgtaaacatgctctctctttttagggatgtccagggacctgagagagaacccatgcttaccaaagagtttctagttccagacacacaggactcgaagggtgacaagtatggttttcagggtccctgaatccacccagtcctcacagaaactcctaaaagctgtcgattgacagcgttgagttcacagctctggtcctcacatgctgatactgcttgtgatatcgaacccgacaggaccccacatcacaattgatttaccaactacaatataatacctcctgaatctccaaattggctcacccaggaacaaaggcttggggtaaaactggattaggagatataagctctgaattttctgagggtgagacacacaaggattctaagtgacacgccacagagtaacgggtctgtgactggaggacccacagatttgtcttactggagacaccacatgcacacaaactccatccttagctgtggaaacaagggtcttttgctatcttagccgaattctgggagtaatttttggaggggaggagatctttgggattgcctctttcaggccctttacaaaaatacctacttcttaaatggtaaagcttacactaaactgaaaaaattacatccttggctttttatgaagtaggtgttggattgaatcactactggaagaagtatggcatcgcaaattctaagcagtggtcaaaggatggatctgttaaattagaaaaatctctaaatttataaaaagattttagattcctttattctaaacaattgacctatttgtactcatgggacaatcaaatttcaaaggagatatgtaacgatttcatggcttgcattaaaaatccttctgataaaattaaagataaaaaatctgaccccctgccaaaaaaatcttttgaagttcatactgcctgctttcaatattctgtgggattcacaatgaaaggtgccttatattgtggcctagcttcaagtttatgccttcgccaccatggcctgggttcaattcccagtcagggccccagcgcctttggtttaatgtttgcgtggcatttgacttttttacctatttagtattggtgagattacctttggtaaaaaaaagtttaaagagtggaaatcgcaattctttgtgttggctaaaatctgattataagagatctggaaggttttatttttctttttcaaagagctctatggtcagaagtcggcttcatgaaaagctaatatttaattatatgtacatacagtctttctggattttctcttttgcctcctgttttgaaaaatatttggatttgagtgaaactccgttttagaaattaattgcttggtacaatatacccatgtaactaccctgcacatgtaccccctgaatctataataagagttgaaattttgacaaaataaaattagattttgaattaaaacaaataggtgcttggttcctctgctcacttctttttaaaaggaattcctctcccatgtacttcttcttttcccttctttaccttccttttggcatctttggtatcacatgaagggatctagagggaattttaagtgactctgaaattccttgagaaatacacaaaaagatcccactcaccccttttgggggtctcctgttctccttgtggagtccagagtcagggacaggctcctccaggtctgcagctctgctctcttttatttcatcttggctgattgctttggttttgtgagtaccaggcattactttgtactgtgagagacacgtcctttgtgagtgcaacggctgctgggtcactggtgagggctgcagtttggagatggctgagagccgttgcaataaatggttgtgattgcagggggctccttgtttctttgcaagtttagatgagaaaggtgcagtttggacacagtttaaaggctgtgaaaacaccaccaatgaatatgatttcctttggggatggtctgattaaaagtgggctgattgttgctgtgctactagccttgaagacatgtttctacagcattgtgcagtgtggaaaaattgtgtggcttggtcttgtggcatgtcccttcttttagagacctcagattcaatgtgaaattcgggatttttgattttcaaagatctagatgccctgccttccagatgtgcctactcttcacatattttaaaattagatcctataaactgcaaatactttgttggcttctgtgagatcagaggtccagttagaaaaggaagacagtttgttaaaattaaaaactatttatctaatctaactagattggcctccaaatatgactttctgacattcagctggttactctgaaaagatttctaaatctcttgaggctcatctatatgtttccttgcaaagaaaaaaaaaaaaaaaaaaaagcaagcccaagcactagtaagaaaaagatttgcaatgtttcatgaaaggagtagatgagtgaagcatttatttgtagatactgggttggatacctgtgcaaagaagaagaggtcaataataaaaattgccaggggatttcttggaacttaacaagctgaattaaatatagaaatgtcaggaaatcaaggcaggaaatactcacttgtggttaggcagacagggcagggttctgagcttgagatggagcaaacagttgtggtgggtgaagttcacatgctttagagctcagctgtcctagtaaagaagcctaagagtctctaaagctcttatgagaagatggattttttttgcctagattaaaaggttaaagaattgctttaagttggataaaataaagctaaatgtttaagcaagttgtgaaaggtttatgaaaaaattaattaaaatatttttgtgtgtaaacatattgactaaagttgaaggggtataattcagcatttctgtaaattgagcattgaaataaaaacacaatgggtttctcttagagcactaacctgctctttaacaaaaattgtaaagggttatagaaagtctataaaaatgttaccttatggtcaaacattaaaattgggtaaatatgtctatcaggttttattaagaattaggtttaacattaatagtacactaatgtaaaggtgaaatttggcttatttggtacaaaaatcatacaggaagcattgtgaaatataaaatgatttttagctttctttgggctatatttctataaatatgttattgatgagggttccaaagttatgggagactcctataattctgctatatctcagtgtacattatcagtcataattataattgtcatgttaaattattgtgggccacagaggtaacagatttccttgtcaattgtgtctttgactatgactaccctaaaacgttcagtcacccatatacacatgttaccttgttttggccctctttagaaggtaattttataatcagctataaagccctaacaggtgctcttaaatgcaaattttgataactttggagattgtgacatcagaagagaggaaaaatgttcgggacacttggagagctaaaatgttcattgatatcaagcaggacaggaattaactgcatgaagtgaactaataggaggctgaagtgatctttttgactttttgcttaaaacgttgctgatcctttgttttgcttttcagagtcaaggcaaattttcttttgagctattgacagcttttaacgattaatcaaaatatactcctatgaacaccatttggagcattatttgtttctctctacccgatttccccagaatttggaaactatttgtgggtattcttaatttatggcaatatagttatttgcataagtgcaataagaatgtgttttctttggtaacaggacacaatttgaaaaactggttattttaccaaggttttgaccagaatgctgtgctttcctttaaggaatcaaacttgacttgtggagctaataaagcctttggaaaactgaccttatatcctgtgaacacagtccctgtacagggttactgatctgtgggaagaaaagaatgtcacattctgacaggtcaggaatcccaagttatcttgaaacttcaagaggacaggaattcacccaaccatatgtatttgatggtagaaatccatggcaggggctcagctttaaaaagtcttatctcagattccttctataaaacaaagtcccattaaaaccaattttaaaagcctatgtgaaaaataattattcttgctgcacctcgtacaaataaagtggcaaagcataataaagcaaattggtcctgtcgtaatttgtctttagtaaaaacgggaaactggggtcgggtgcagtggctcactcctgtaatcccagcactttgggaggctgaggtgggcagatcatctgaggtcaggagttcaagaccagcctggccaacatggtgaaaccccatctctacaaaaatacaaaaatgagccgggcatgatggcgggtgcctgtaatcccagctactcaaggggctgaggcagggaagcggaggttacagtgagtcaagatcgtgccacttcacgacagcctgggtgacagagcaagactccatctcaacaacaacaacaaaaaagggtaactggagagagggaagttatgtttcaaaaacttttggaaactatagtacacctgtttttaaattctagtctggcattcagtttttattattttctacagtttgggttaaattcgtatttctctggctacaagtctcctaaataatcttttcatttgtttcctttttctttccctttttccccatttttcttaattggaaatcactgaaacctaagctgtgctttcttaaagccctgtgaactgaagactagacaaccgaaacttctgaaggaagtagcagcaacctatttatatgtgttgctgttgcctactattatgttttagcaggtgctgcctctacacccccgaaacagagagtgctactgggaacaaatcgactttttccactccagtgctgcattcggtgccccataacgatgaccccctctcagcaggaagtagccagaaagattacaatgctccatctccctatgattcttgtgataaataaatatacaagcatgatagaaatcatgcgcaaattgacagtggggattgtggcaggccagatttcactaatggaggtccccatcacaactacttcagtactgactgagtggttaagttcagtatcaaaagctgaaagtgccagcgcctttctacaaaggctagaatgtaacaaaagcccaccaagggttttacctaggcctttcctgggccttacagcatgacaaaacaaagaaggaattcttaaccagacctgtttaggattaaacaaatttaattgggggtctgaagaaactcgccaggcctccacaaacaagttcattgggggtctaaaggaaccccccccaaacctctgtgattgagcaggagacaaggtcagggtaattgccccagcacctggactcatttagatttaagtaaatgtactgaggctccagagaaaggtctccaagacttagactagagttacagattaaaagaagttaatcacttatatctttagataaatgcacactgacacgtagacatacatcttagaaaatatataagctctggaaaaccttgtaatttacagttggtctggagatattttctgggccttctctctgtaaccggttccagaaataaaaaactctcttcctccccagtttatctgcatctcgttattgggccgtgagaaatagcagccagaccctgagtttggtctgggaacacactggctgggcttcctgcctggcggtagagcttcactgtcctccttcccagccaaaatgtggcccttgaaggcttcctccccaactgaccggttttgggttctaggtactcagggaacaccgtcttcaaggaggccattttcatactgttcctggtttgatttttctgaaattaggaaatgccccttgaggcatccaggattgtctttatttcccctgaagcttcccctcctgaagaaaaaagttctcaaacaccctcaggactcaaaccccaagttcaccctgtgaaacattcccatttcctaaacccaggcaggctcatggccctcagcctctcagaccccatggaaacctcctcccccacttcacgggttctctccatattgagagcctcccctcctcggcacacaacccagagactcaccccaacatgtgtagcaaatcaccctggaaacaatcatggctgaacgtggtagcccatgcctgtaatcccagcactttgggaggcccaggaggtggatcacctgaggtcgggagttcgagaccagcgaggccaacatggtgaaacctcgactctactaaaaatacaaagttcactgggcattgtggtgtgtacctgtaatctcaactactcaggaggctgaggcaggagaatcacttaaacctgggagacagagattgcagagagccaagatcgcaccattacactccagcctgggcaagaagagtgaaactacatctaaaaaaaaaaaaaaaaaaaggaaaaggaaaagaaaaaaaaaatcatgaggcaacattgcatttaacaatattttatttatcaaaagacacttgtctttctcaggtaagtgaaggtctagagatgaaacgagtcccgatgtaaattgccccatgggcattgctgagatcacaagatcatcactgcagcatgcagcacaatagtaaatttctcaggatggaagttcaacaatccaaaaggtagtattttttttcatgatgctcagtccatcatacgaaataaaaataaattccttttcatgatcatccattcagtagaaaaaatgatagtaaatttgttctcatgaagatttttaccgtaacatataggatttatcgttattattattattctttgttttttgtttttttgaagcggagtctcactctgttacccagtctggagtgcagtcgtgcgatctgggcacactattaacctccacctccagggttcaagcatttctcctgcctcagcttcccgagtagctgggattacaggcatgcgccaccacacccggctaattttcgtatttttactagagatggggtttcaccgcattggtcgagctggatttgagctccggacctcgggtcatccgcccatctcagcctcccaaagtgctgggattacaggcgtgagccaccgcgcccggcctcaatttatcattattcacgcatccacaaactgggttcttatattttgtacgtgattttttccattgaggagagatatctgtgcatattcatgctgctcatatttcatccacaaactcggttcatatttcatccacaaacataattttttccgttgagaagagatacttgtacatatttatgctgttcaaattcacatttcatcattcttttacaagaaatagataatgtattttaaggttttccagtggtattacagatattttactgggtgtatagatagaaattaaaccaaacttctttgttctggccgccagtcatgcatcctgttttcaacatagttcacatacaactggttgtgtaaaaatgaaattattttgtttagtacaatcatcaacagttggttgattagatttttaattatcaagttaatcattgtcattatgcttctcatcgcactcgtcattaattgctgtgggaggaaatttgttatgttccctatgagagggtgtatcacaaattcaaataagaattcaacgacaatggactgtataaaggaaataagcaagtccatggaaaacatatttttttccggaaaggattaaaatatttttaaaaaggaattaaaaaaaaattgggcacggtggcaaatgcctagagtcccagctgctcaggagatggagacagaaggattgcttgagcccaggaataagttggaggctgtagtgaacagtgattccaccactgtactccagccagggcaatagagggaaaccctctttctaaaaagacaaaaagaaacaaaacaaaacaaaaaaacaccacatcaaaaaacccaacaacaaaatgaaaaaccaaataacagcaatacaattggagctattcgatccaaagaagtaaatgaaacataaagcaaataaaagagaaaagctaatacctgtgtcctgcaggactcagtccaagttctgctctgactccctcctggtgagccaccccttaaaaagtcacttggggcggggttactttgacagacagtcttctgtcaaagagggaggcggtaaatagcacttttttttttttaatttaacgcctttccaacaaattagcggctatgttgtctaagagtgcaaatgtcagaggtgggtacaggcagcaagaccctccccacaggggcagcagaaggaggaatgactaagggaacaagactttagtgtgctcaactacacaggacaggaaacagatgctttttacaaaagctggtggacttgaaggcagaatattttcaagttcctgtaactgcgaactatgacctgtagcctgtgagagtgactttctgtggcaaaggagcttttgtgaatgtgaggaagttaattatcttaacagtgggaggttctcccggcttatctagctagaccctcgtgaaatcccaagtgtccttaggaaggggaagcagagagagatttgagtccagaagaggaagaaggtgatgtgaggcccagtaggggaacaaagggcgatggcatgtaaacacttagcccccagaagtgggagagggctggggttcatcacaccagaatccctaacaatcagccttattttaattacccttgaaatggaaggaggccttagagagccagaggcttggaggggcaccctctgctgcatacacagatcccaactgctgtgggctccaaataattgcaccagggaaatcacaaattatcaaaaataaaggatgtaaagcttttaaaaaatattaaaagcccaacaaataaaaaaagttctaaatctataaaattgacctcagtctgtatatttagatgagtcatgtgtatatagcgtttcacttcaaaatatatgataaatctctcattcattggcttaaaaataaacacttcaatcaagtctttatcagaaaaattgaaacgttaactcaattgccttttagttcatgtgactttacaaaacttaaaacaataaagtcagttttaaaaattattagtaaagtaaaagaaaaatatcttcacaatgtagacattttgtccacatgagacatgtgaaatattgccattactaaatatttgcaggtcaaaaactgtttccaaaacattttaaataatcatctggcctgtctgttttagagcattcaattctagctgaggtctggggacatgtgaaaggagccacggcccgactccgtgctgggaagagtcagacattttccacagctctgtcctttgctgtgggctctgcaactcctaccaattaaaattgcttacgtttttgttttatttttactaaagaggggttcctaaaagctaacattatactgagtatatgtaactaaaactactaagaaaacaatttcacaattatacaaatgtgccaagtaaatgaaaaaataaactgtattttaataaaggttataaaaagaaaaacatatagtggtgtgaggactgtctcaggtcttcactgagcaagggatcatgacattctatggcggacagctgaccttggctttctgctcctcttgattatgtctactaagtgacatacttactctttttccacctgtcttgcctctaagggtaacaggttttatgagatccctcctagtgctttgcaggtcagcctccctttgctgcattccaattttactgcctataccctccagctggcttttgatgacaaaagtcctggtcccagccattctcagattctgtcatccccgtgggcactatggagctcagcactatgggaggttccccaaaaatctcgttttctatgaggaatggccaccacctgcatctcagtgatgctagtgacccctttcctactcctgtgctcactggtcctcatgaagatcctggttggtctgtagccccctatttttcctattaaagagaaattacagtaagacccatttgtgtgcaaaatcaattttaggcttattacacttggcctgataatttgcataaaatgcagcaagaattcatcggccatataggctacttttgagttaattttcctgggtttttacctaaaaatatactattttggttagagtcttgtgaaaataaccaatgtgttcaattgttttattttaaaaggctcttactgaacactataaatatgtataagttgaatatacaaactatattgtcataaaatcacaacccaaaatgtggagaacgcagagggaaaggtaaatttgctcgcaaaaacatacttcacccaaataactggaaaaaaaaaaagactttcatgacccttctttaaccagagcagcagctttcaaacaaggtgtttgccttggaaatgccattcacaagccaaacggcccttgagagctgtctgtcaggcactgtagaatctagcagctcctcacagagttagaaatagtttcaggaaagagattccctgcttttagtaactgcactttatattcccagatagcgagattgtatgtaaaccatttttatcttattctggaactcttttgggtactttttttttttttttttaaatgatggagtctggctctgttgctcaggctggggtgtagtggtgcgatttcagggtatgagaaaatgcagctggacctggctctttccaggaagaccctcacagccaaggagtccaaagcctggggttttcatctaattccagtgtgactggggtaggagcagctttggtgctgggtgtgtgtgtgtgtgtgtgtgtgtgtgtgtgtgtctatgcctgtgtctgtttagggtgttaggctcgtggttgtctagatacaaatgtcccagggctcaggagccccagggttatgtcaggggcaccagatgaaggtgtcaacagaagttagggcacaagggacaaaggtgagagcaaggttagattcatttaggtgcaagaaatcatagagggaggagggagaggaagccctcctgctaccaccgaggaagaagcgcagcttaaggcagaaagcctgtccggagaggaagtgagtttgagggcagggctctctgggtaaagtacggtctgggacaccagcctgggggaagggtacagaatgcagagtggcctggcgtggggactaagaacagaggagagcagctttcactgggagggtcagtgttttcagtgtccagcactgagcaaggtgagatttgggcagcttgctgtgaaataaggtcaggctctggcattgtccccattgcgtgtgtgtgtgaggggcactttgggagagtgaactctccacctccatcctctcatacgtccttcaaccgagcttgccagttaccctgattccaaggagatctatttattgttgacaatactggatcctagcagaggctgggtaggagcctgggcacaagcaagtggaggagggggcctgggcctgaaagacctgggaggtttgagagaggacacagcccacagaatggagcagatggggtagagtcggcaagcattcagggctcctagtaagttggacaatggagaccctgaaagatccagtaaaacggggagaacaaacaggtccccaactcacatccttgcagtgcctggagcttcagactccagacaggtggggaaggaaaattgagggatgtgaacatgttggagaatgtcgtgccctgaagaatgaagaaaaggggggtgaggaatgagagcaggaacggcttccagtgcctggtgcccaggagaactcagaaaatgggtgtggtggagaggaatcgaggaaccggaagtggtggaagtgtgcagggcccctccgagatcactgtgactgccaggcgtcctccctggctggagagcttcactgtcctccttcccagccaaaatgtgtcccttgaaagcttcctccccaatggactggttctgggtcctatatatttgaaggggtggcctgcctctccacacctgtgggtatttctagttgggtgggaggagagacagagaaaagaaataagacacagagacaaagtataaagaaacaacagtgggtccaggggaccagcactcagcacaccaagggcctgcaccggcaccggcctctgagtttcctcagtttttattgattattattttcattatttcagcaaaaaggaatgtagtaggagagcagggtgataataaggagaaggtcaatgaaaaacatgtgagcaaaagaatctatatcataattaagttcaagggaaagtactatgcctggacgtgcactcaggccagatttatgtttctctccacccaaacatctcagtggagtaaagaataacaaggcagtattactgcaaacatgtctcacctcccgccacagggcagcttttctcctatctcagagttgaacaaatgtacaattgggttttacaccgagacattcagttctgaggggcaagcaggagacagtggccttcctccatctcgactgcaagaggctttcctcttttactaatccacctcagcacagaccctttatgggtgttgggctgggggacagtcaggtccttctcatcccatgaggccatatttcagactatcacatggggagaaaccttggacaataccccgctttcaagggcagaggtccctgcggctttccacagtgtattgtgcccctggtttattgagactagagaatggcaatgacctttaccaagtatactgcttgtaaatattttgttaacaaggcacatcctgcacagccctaggtcccttaaaccttgatttcatacaacacatgtttttgtgagctccaagttgggtcaaagtggctgggtcaaagtggctggggcaaagctacaaattaacaacatctcagcaaagccattgttcaaagtacaggtctttttcaaaatggagtctcttatgtctttcctttctacatggacacagtgacagtctgatctctctttcctttccctacatatattcatggaccacagtcttcaaggagtccatttcctcactgtttttggtttgatttctctgaaattaggaaatgccccattgaggcacccaggattgtctttacttcccccagagcttccactcctgaggcaggagcttctcaaacaccccccaagactcaacacctaatttcaccctctgaaaccttcccatttcttaaatccaggcagggtcatggtccttagcccctcagatgctgtggagaccttctttccctttcatacattctctcaagattaaaagccacccctcctcagcacacaccccagagactcaccccaacatgcattgcaaatcaccctggaaacagtcataagaccacactcatttaataatattttatttatcaaaagacactctttctcaggtaagtgaagttctggagaggaaaagaggagtcctgatgtaaattgccctgcaggccttgctgagatcacaaggagattgttactgcagcttgtagcacaatagtaaatttcttctctggatggaagttcaacaatccagatcgtagtatattccttttcattatgctcagtccagcaaatgtgatgataacaaattccttttcatgatcatccattcagcagagaaaatgtttgtaaatgtgttttcatgaagatgtttaccataacatacaggatttaccattatcaatgcatccacaaactctgctgttgttttttatacataattttttccatcgagaagtgatagttgtacatattcatgctgttcatatttcaaccacaaactctgctggtttttttatacgtaattttttccattgagaagtgatacttgtacatatttgtgctgttcatatttcatgtttcatcatccttttacaataaataggttatattgtattttaagtttttctaactgtagtgcagaaattgtactgggtgtatacatagatatcaaaccaaatttacttgttctggctgataatgcatcatttatttcatagattatgtatttctttgacacatttcacgtacaactaattgcataaaaatgaattttcttttagtatagacatcagcatgtgcttaattcggaatttaattgttgagttaaacatcgtcattgccttttccgttgttattaattgctctggtgggaattttgttatctcatacataagacagtgtgccacaatatctcttaaaatttcaatggcaataaactttatatttaaaaacagggaatctatggaaaacacatttttttctaaaggattaaaatatttttttaaaataattttctaaaaagttaggcacggtagcaaacgtctagagtcccagctactcaggaggctgagacaggaggattgcttaagcctacgagttgggggctgcagtgaactgtgattgcaccactacattccagccagggcaatagaagttaaccctttttctaaaaaaaaaaaaaaaagaaagaaagaaagaaaaaaagcaacaacaccaaaacctcaccaacaaaatggtaaagaaaaaaaaaacagcaatacaatgtaagctatttgatccaaagaagtcaatgaaatttaaaacaaatgaaagggaaaaagtaatacttgagtcctgcaggactcagtccaagttctgctgtgcctccctcacggtgagccacccctttagaagtcacttgggtcataagttaacccgataggaagtgtcctggccaatgaactagggaggtggtaaatggcaccattttaaatttaaattcacggccttttcaacggatcagtagccatgttgggtaagagtgcaaatgtcagaggtgaaaagaggcagcaggaccctcccctagtgcttgggcaacagaaggtggaatcactaaggggacaagactttagcatgctcaagtacacaggacagaaaacatgctttttacaaaagctggtaaatatgaagagggaacattttcaagttcctgtaaccaagaactaccgcctgtaaccggtgaaagtgactttctatggcaaaagcgtttttgaaaaggtgaggaagttaaatatcttaatgttgggaggttcttctggtttatctggctagaccctaatggaatcccaagtgtccttatggagcggggagcagagagagagatttgagtccagacgaggaagaaggtgatgtgagtctgggtgcgggacagggggagaatgatgctatgtggggatctgggctggggaatgacttagctgcatgagcggagtgacttagactcctgaactagaagaaatctagggctcatcacctcagcagccctaaccatcaaccttatttttattacaggtcttccatcgacggactccctaaaaagccagcggcgtggaggggcgccctctattggacaaatagatcttgactactttcggccctcaaatagcctgactaggcaaataacaaataataataatttttttttaaatcatggaaaatattttaaaaaacaattaaaaagttataaatctataaaatctgcttctgtctgtgtgtctgtatatttagatgtctcatgtgtacataatgtttcactaccaaaatatatgatgaaaccctcattaatcggcttagaaaactaaacacctaaatattttctcagaaaatacaaaaactttaactcaaatcccttttaattcacctgactttaaaaatctttaaaaaataaagcatgctttaaaattattagtaaagtaaaattagaacatcttcagaatttagacatttggtttaaattatacaggtcaaatactgcccttagtaaatattttcaggtcataaacaactcctgtaatcttttaaataattgaattacatgtctgttttagagctttaagttctagctaaagcctggggacaaatgaagggcaccatgccccctctctgtgctggaaagagacattttctacagctctgacccttgcagtaggctttgcaactgctacctatcaaaattgcctacatcctaagtttattattaaaaggagttgcttggagttaacattataatgaatatatgtaactaaaactatttctcatacaaagtatatgaaaaagtagaatgtatttttaataaaaagttataaaaagacatgaacatgtagtttttataaaaaacagtaattttgtctagttttgcagttctaaaaagttatgttaaattcaaaaataaaaaataacaagacaagactcaaggtttaaataagttgtaaaagatttgtaaaaattagttctataaaaattttacaaaaaaaagcattggttaaaatttaaggaattattttgtttttacagaaattaaacattcattaaaaacactctgatacaaggccttaatttgggttcatgtatcagaatagcagggttttcttagaatattaatctattctttaaaagaactatgaatgttatgcaaactttataaaaatcttaccttagagtcaaactgattaaaattccatagattttacgtaaaattttattaaaaattaacttcaacaaaaataaaatttgattttctcctttaaacaaaagttttgcgtaatattaaataataaagcatttttgtttaccttttaaactataaacacacacacacatacacatacaccaacactaaagtcagctgacctcatactgtctttattggatattcttgtttaaaaaactatcttctttggaaaataaagttttttattttaaaccatattttaaattatcattttgactaaatccataacatacagtgatctgtaataattctattttataatatcaagtgttttgaagaactccaggaacagccatgagagaacactgtggtttagtaacactttatttcctcagtttgaaaatagttgtctttcttggggaggccggtttcagcagatgaaaacaagagtcatgatgaaaattacccagcagtggttagtgtgaccataggaacattgtcatcaggtcagcagaaaacatatcagcaaatttttctcatactggcagtgtgtaggggtggatgtttacagttcctgaagccccagtggtcgtgtggtcttttagttttgccatttataggcaacttgtggtaactagctcaattagacacattccttatcacaaggacagagggctttctgtatcctagggttcttgccttggcattccagaagaatcaggtcacacgtggacgtggagaatgagtgcaaggttttattgagtggaagtagctctcagcagatgggggagccagaaaggagattggtttctccctggattggggccgttcagcagccctggctctcctctgactgccccaggcaaaatccacatcgttctataagtcggtgccctgctggtgtgctggtgcctgttgtcatgttcctcttcatgtccagccgcctgtgtgttcctccgctgatgtgctcctctcgacgtcaagcctcctgtgtgtctgactgctagggtcttggggtttttataagcacaggatgggtcttagcaggccaggatgatcttgggaaagacaacattcggtcaggaaaacaaaaatgcctgttgtcatctaggtccgtggggacaagcccaggtgtggagcttttagccagggaccacagcctcctgtatccaacacttcccttcaccttttctatatcattcaaagggatcatgcccttcccatcccagcacttcactttcatgtcatttgccccctctgaagaggtacatctaactgccattagaatatggatgatgaccagtcttagctgcttcctgctgaaagggggcattgttttgggggaaaacggcagtcagattcctcccaggggtctctataataaaagatcgaggtggctactttcaggaggtcctctaatgtactatctggtcccaagtcccatttctgcaacctcctcctgatgtcaggagctgcctgagtaataattttatcctttaggattatctgtccctcgattgaattaggagatagagaggtgtgatttaccaaggcctctcttagcctctccaggaaggcagtgggattttcatcaaatccctggttaattatggacaacttagtataattgagaggcttggtcttagacctacgtaagccctctattatgcacacctgaaagtgtctcctcttccagtcttccatctcattattgggatcccatttagggtccttcactggtgctacttctcttccagttggataatattcgctcccttccctgatgctataggtgatgcaaagctcatccccaaatctctctgctgctggcagagcagcctgcttctcagtgtctatcaggttctgactcaaaagtaacataacgtctctccaggagagttcaaatgttagggtgaaattctggaaagcttctatatatctatcagggtcatctgaacacttgcccagatctcccttaatttgctttaagtcttgtagggaaaagaggacttggaccttactgggcccaaattcactgggcatctgtaggaggggcaagagtgagactgggcttgtttgggatgaagatttctaggaggggccaggtgagaggctgaagctggatacggaggttggggtggacccagaggagcagggcttgagggagctggcacgtcagctgggggtgcgtctgggactcgtgtctttaattccctgggcttgaccctggcagccttccccgagacagcaaacaggagggctggaacaatcctacatgtcagcaaaggtctggattgctttgcaaggtatagaaagcctgcacatttggggcctcagaccatgtgtcctcacatccagagaaaagttctaattgcaggatggtattgaaatgaatggtcccttcctgaagccaagccagtccttcctgtaaaccataatttggccaaacctatgtgcggagggctatgagatgcttttcctctggattctgagggtcaaaacagtcccaatggttcaggatacactcaaggggagtacaagctgggggtggtgaggagaactggctgcccattctgaaagacagggaatagaggtgttcctcatttcccttccttcttttggcaaaaagctcagggtgtgatggggagggaaagcaagcatcttcacttcactttccacctcttacccctgcgccctggcaaccttggcaggtgccggccacaggtacaaatgcggtatgtacccatgaagcagggagaacctggagattaggaattaactgccctcacctatgtttccttttctccctgctgttgaaaaactttgagttccctgggcctttttatcccatgaggcatggcctccttctgtgggatggggttcagtcagcaggaattggtcctgtccatttacattgtgcctgttgcctggctttgaattcctcagacctgctttctctttctagggcctcagcctgaagcttggaattgagtttgggactgaaaaagcatttcagaggctgtttatatccatttagtgcctcaaataagccctgctgaatttgcaattatcagccagcaggggtcactcctctgttaacttccctattagaaacagagcggtggggattctcacttagaaaagaaaaaaagagaaaaacagttaaagaggcaaaaagtggggaatgctgggggaagaaccccttgcttagtgcaagtgggcccctctaatccttataactttcccatccttcccccagttcagaccaggttgaattccttggccatggaaggaaaggttccattgatgcagtgggtgagaagcactctgtagggtcctggctaccatcggttttctcacacccccctcatcccaggcagtggagggagacacttctgcgacattgctccccctgccccttcatggctattgggtgtggcctttgcctgctgcaggcatgcctaggtgctggagctgggagggaaaagggtaaggagaggtgccctggaagccgctcatgcctggggctgtcaaggtggaggcatacatggcacctctaggaaaaattggtctgatttgcacctttggcggctgagccaaatgctcattttacttagtaacattgcctcagcctgtagcaaaactcttaacattataaaggaagagataagatccatttcaaataatgtgtgagagagaaaagagatgaaaggaaaacagagtcttttacctgcaggaaagggagagaagtggcagagttttggaagaaaggcaggcccaacagtttcccattcactcacactcaccttccgagatcccagacgagccaccagttgaaatgggaaaagtttccttgtccccctcacaggaggtggagtgggggtgtggcttgcttctttagtactccgctgctcaaacctctagggaagcatacagactggcaagttgtggggctacaaccccatggcagcatctaggggtagatgtttacagctgctgaagccccagtggacatgtggtaccatgtgctcttttagttttgccatctataggtggctttgtggtaaccagctcaattagacccattccttaacccaaagacagagggctttctgtatcccgcggttgttacctaggtgtaccagaaaaatcaaatcacacgtggtcttggagaatgagtgcaaggttttattgagtggaagtagctctcagcagatgggggagccaaaagggagaatagttttcccctgaagtcgggttattcagcggcccaggctctcctctggctgccccagccaaactctatgtcaatccattggtcggtggcctgccagagtgctggtgcctgttggtggattcctctcagcgtcgagagtttttccctctcaggaaagggagagaagtggcagccacccatgtgttcttgcactgatgtgctcctctcgacgtccaacctcctgtgtgtctgcctgctagggtcccagagtttttttaggcacaggatagggcatggtgggccagggtgatcttgggaaatgcaacatttggtcaggaaaacaaaaatgcctgtcctcatctaggtccaggggcacaagcccaggtttggagccctagccagggaccccggcctcctctacccatcactttccttcaccttttctgtatcattcaaagggaccatgcccttcccttcccagcacttctcttctgtatcaataggtgatgtttttaaaatttcccaactctagtgcaggcatggtactagacatatacatagaaataaaaccacacttattcttctggctggcaagacatagtatttttgccaaattatgtgttgttttgaagcattttatgtacccctggtcatataaaaataaagctattttgttcagtacaaacagcagcattttctggattagaaagttaatcatcttaaaagatcatcacggatttttccattgcactcatcactaattgctttggcaaaaaatttcttatctcacgcatgacaaaatcagccgcagtatctcctagtaatttaatggtgatgatctttataaaggaaataagcacatcaagggaaaacataattttttttaaaaaaagagtaataaaactttttaaaagtcttttttaaaagactgcttttctaaaatagtaaaataaaactccaccaataaaaccaccaacaaaacagaaaagaaaaaataatgatatgatcggagctatttgatgaaagatggtaaattaaatttaaaatgattagaagagaaaaagcaatacctgtctcccgtaggtctcagtccaggttctgctatgcctttctcctggtgagccacctatttaagagtcgcttaaagcatatgttaatccaacaacagcagattaaaaaccaatgcaatctgaactatttgatctaaaaacataaataaaatttaaaacaaataaaagagaaaaagcagtacctgtgtcctgtaggtctcagtccaagatctgctctgactcccttgtggtgagttagccctttagaagtcacttggggtggggcatatgttaattccactaacattggttctggccaatgagtcaggaaggtggtaaatggcaccttttcttcttgctgatttctttcagttcctttggagtctggacattagtcctttgtcagatgcctagtttgtgactactgtttcctatactgtgggttgtgtgtttaccctgctgatatttcttctgccttgcagaagattttcggtttcattaggtcctattgatcttattctatttttatatttttgcgtttgcttttggggcattagtcatgactacttggcctaagccaatgtctagaaaagctttttggatgctatcttgtagcatttttagactttcaggtcttagatggaagtttttatatgctttgttaaagatcaggtgactgaaagtaccgggctttgtttctcggttctctattctgttccattgctctatgtgcctatttttatacttcctgcaccatttattgaataaagtgtcctttccccaattagtgtttttgcatactttgttgaagattagttgtctgtaagcatttggctttatttctgggttctctattctgttccattgctctatgtgcctatttttatacttcctgcaccatttattgaataaagtatcctttccccaattaatgtttttgtgtactttgttgaagattagttgtctgtaagcatttggctttatttctgggttctctattctgttctattgctctatgtgcatattttataccagtatcatgctattttggtgattgtagccttgtagtataatttaaagcctgccttcagatttgttctttttgcaaagtattgctttggatatgcggtcacgtttttggttttgtataaattttaggattcttttttctagttctgggaaggagaatgatgatattttgatgagaattctactgctctgtagatggctttggagagtatggtcactttcacaatattgattctacctattcataagcttataatgtgttcccatttgtttgtgtcaactgtgatttctttcagcactattttgtagttttccttgtaggaaacttacattaacctacttggttaagtatatttctaagtattttacttattaaaaattctcagggaaatgcaaagtaaaactgaggtgggaaattaaagaaaaataaaattaaaaagaaagggaaataagctttcttgtattaagctaacttgtcccagaggcagcaacaggcacagcccagacccaggaaaagtcttgataatattatttattgtattctggagactcttccagcactccttcaatgtagggagaagaaaaacaaattttcctttgttttatggtatgagtttatagattcttgttctctttaactagtaacttcaagtattctgttttatctaagaagtatggcaaaggtcatgagaagcctgagcaggcctgaactacagctctctaggcaccatagtgaagataaaccaatgcaagcctctttagagcaaaacctagataatagacatctgggttgcatagcaacagttatgtgcaatcctgagttatgaacctgttacaatttgattaactgtctttttcctgcctctgtatccctgctttcacaccactgtaagcttgcttcaagctggcccacccccttttgtgaagtgtgtataaaagtcaagtgctgtctttgttccaggccctgtctttggacgtgagtctgctgggcctgagagcactcaataaaagattctcctgttttaacccaaagcctctctctcatcctcctaaatcccacaacaaaaccacaatgagatgctatcttaatcttgctagaagcccataatttaaaagtcagaaaacaatagatgttggcatagatgtggtcaaaagggagcactttgacactgctagtgggaatttaaactagtccgaccactatggtaaacagtatggggattccttaaagaactaaaagtagaccattcattccagcaatcccattactggctatctacccaaaggaaaagaagttattccataaaaaagacacaagaatatggatgtttatagcagccgattcgcaattgcagtgatatgggaccaacttaagtgcccatcaacgaacgagtggataaagcaaatgtggtacaccatggaataatacttgataataaaaaggaacaaaataatgtcctttgcaacaagttggatggaactggaagccattattctaagtgaagtaactgaggaatggcaaatcaaatattgaatgttttcacttttaaatgagagttaagctatgagaatgcaaaggcataagaatgatataatggacttggggactcagggggaaaggttgggagggggatgaggaataaatgatgacatattgggtatattatacactgctcaggagacagatgcctcaaaatctcagaaattaccactaaggaacttttatccacataaccaaaaaccacatatattccacacactattgaaagaaacataaacattattttaaaaaataaagccacttttaaaattagcaaaataaaataaatatgtcttcagagtttagatattggatccaaattagacagatcaaatactgcctttactaaatattttcatgtcattaacaacttctaaaacctttcaaacagttttttgacatgtcttggaaccatccatttctagctaaggcctgggcacctgtgaaatagggccatgcccccccttatactgggaagagtaagatatttcaagactaagatgttttctacagctccatctttttctttaagctctacatcaaggacataattaaaattggttgtctcctaagtggtttactaaaaatgcatacttaagagttaccattataattaatatttgtatctaaagctacttaaaaattttcacacacaaatctgactgaacaagtaaaatatattttaagtcaaagtttataaaaggacatgagaacatagcttttatgaaaaaattagttttgtcaagtttagaggttttcaaatattttaaattcaggaaataaaataacaaaaagacaaaagaaaatggttgaacaacttagaaaaggtttgttaaaattcatcttataaaacaatctacatgtaaaaagtgggctaaaatttgaaagagattatttaggttttccataaattaatccagaaggggtaggaagtcttaagaatgaggaaggacaggaggaaggggaggtcatcctgacactgcagaggcagaagtgcagctgaaggtatgaaggctaagaggggaggggagtttgagtgctgctgcctggctgtcagagcagaggagggtcctgggcaccagacttgaggaagggatgaaaatgctgggcagacctgtagtgggcccttgagatggcagatagtggtttccagagagagggccattgttttccagtgcccagcactgagcagagagagttttgggcagtgtaaaaaaaaaaagagaacttacctctttctcgttttagaaaaagaacagtctaagaatatcagcagggaaactctcagtgcttcaaggggttaaacgcccttttggctttcttgtgttggtttcatcatagaggaggagaaacttcttggaagtgttcctaaaaacacaacacgtctgcttctcctttcaaaaaaggaagtgctaaaacacgaacactctagatccaaatattaatacggatgtctaaatgcttccgttttccaaggggcagaaagctaaaggttgtaacctattcatttcagtcaaagttggtgaaagggaagcaaaggaactgggtggggcttggaaggatgacgaagctcaagctcattggccagcaacctctctcctgggggcgggaggggtgagcatacgtcattgctttggcttctataaaatgaggaggactcaccgagtgtgaagagtccttctggtgattgcagctgagagcacactcacgacgttctgcaaggattctctgattatgattctgaagggaaaagcgatggaatggacagcagagattgtaattttctttatcttgaattacggaagaaagtatctaggacagaaatccacgacaagtccttggaaccagcagatctcttcgttcacggagacgttgacgtattctctattgaagaagattcttaccttcttactggacaaggttttgtcagttctgcgtgactggattgtccgggagactctgaggaaactgatgtcacatgtttttccaaagaagatgtttctggaaccaacaactgtgattgtggtttgaggacttctgagagttccagtacaggaaataagcagaacatcagctggaggctaaacggatccagacttcactcttcacttcccttcctattcagtctattgtgcctgctgactgagaagcttggctggtatgtgagcaaataaacggaactattcagaaggagatgttgacatattctgtattgaagaagatccttatcttctcacctgacaaggttttgtcagttctgtgtgactggattgtccggaagactctgaggaaactgatgtcacatgtttttccaaagaagatgtttctggaaccaacaactgtgattgtggtttgaggacgcctgggagttccggtatgcgaaataagcagaacatcagctggcggctgaagggatgcagcctccactcttcacttcccttgccattccatctattgtgtctgcctgactgagaagcttggctggtatgtgaggaaataaacggaattataaacaaggagattgtttctcatctacttcattctgttgtggcttttctattttggggttcagggtgtgtgacaaggaccaaggagatgaaaggtttcatgatggagaaagcccaggcaatcagattgaagagctatccacagggaatcttggctgctgaggggctgcaccctgcaacggactgaccatatgacagaaaagggttttaaaggctcaacttctggactgagaacccagagtaatttgggaacctcctctgtgaggagatatgaaagctgggaatcatgacatccctaggaatggaaggcacatttcctgatggaaggggtgctttggaaaacaggagcagagtagacacagcagccttgtggatacgggtgggcagcatgcatgggtgatgtgaacgtggagtgtttgtgatcgaaactcaaaatgtctgacaaagtgaaaacctagaaaccacaatgaggaggaagagtttgtgagggcaatcactctccccatgtgtgaaaatcgggggctcttaaaatctcatctggagaggtgcagtctaccaaactctgggactttagcctccccttttaaaaaaccgtgcatcaataccaacgtccgaaaccacagaaataacacctggcttgcatggagacaaggacaaaaagccgtcatgatgagttgttctgctcacttgctgcctctgttcagtgcacaggatattgtccacccactagcaggctactgcaagagaagtgtgcaatatgttccctatgtgccatatatgtgccatatggcccatatgacaactgagtcagaaaatatctgatgccctcagagttacactccacctggagcttgcccccagccatccaggacctaggctccctaccctgtccaattttctggtgttttgggggcttcattctctaaggtgtgcccactctttactcaaaccaaaacacccacatattcctgcccatgaacaaccaatcaaccacttctcagttccacatcctgctgttgggtctctagtggtgacactgtaactcccaggtcatagtggtgacactataacacctagctaaattgatgccttgtctctaggaggccatgggctcctgcaggtctcatctgactctctgtagccttccctgacaatgctcacaatacccaagccagagccacattgacagcaagctgctctcatcttacctttgccagacctggccactggaaaaggctgaccctcatcctgcaatgcctatacctccaacctttgtctcaagctggtgtcctggagggacttctaagcagaaaacagattcagactcccatcctctcctgaatggcctcatatccaattctcagaccctcagccttcattgtaaggacacttcatccatgcccttgagtattctgtctgcactgtgtattctgcaatagattctcctccctctgcgaccctcaactccttccgcagactttttgttttcttgatcatctaccatagtcttccactgggacactgccaagcccattctggagagtgagttgtgcaagtacactgccccccatctacctttcgggaggtgtatacacccttctttctcccaggtctggaggctttctattttcatcctgaggcatctccacctgctcttggattcttcaaattgacaaccaccagttaacaagaactatgtgtcaccaaatagccaaacaatggcaattacaaaaataaaattaatagctgtaacccccattagcaaggatacacaaatcaaatcagggatagtgggtgaggaagtctgcctaacattcaaggaaggattctgaagtgatacaaaatcattgcctttgctatctttagaatggacactttcagccaggcacagttgctcagcctgtaatcccagcactctgagagccccagttgggtggatcacttgaggccagcagcttgagaccaccctgggcaatgtgcagaaaccccaactctactaaaaatacaaaaatagccagttattgtggcacatgcctgtaatcccaactccttgggaggctgaggcacaagaatcacttgaatctgggagccagagtttgtaatgagcgaagatcatgccactgcactctagcctaggcattagagtgataatctgtctgtggaaaataaaaacattcctcttcaaagttttcttctttaaatcataaatgttggaattaatatatcctctttgaaactcactttcttcaagcttctttatttgatggtagtaaatctttgttaagctttatgaggcaagagtaatggaagaagcatattatatatatttatactctaacctcagtgcttgttctagcaagctcaggcatgcgtgaatgtgcccaggcatgttccagcccataccttatatcctttccttattgggaaatgctgttactcctataagcattcttgtaagcaacttcctctttttctttgtctccactatctttacctattgaggacagttttaggttcttagccagttggatgtagcatagactgtgaggtccaaccccagccaatggagatagcacacagcagtagcgacctcatgcttaacagataaatattcctgtctccctttgtttggggtgctctcagctgatgagcaacaccctttctaaagaaattaaagttgtcttgctgagaaaacttttggtctaaatgctgattcttccttgcagcactgaagaagaagcaattatttccaacactttctcatacacaaaaaaagaagaaggtggaagaaaactttcttgtgcaccctatccctcactcagaaagacaacagaaggctcctagtggcaagccctagaggattcatttcttttgggaaccctcttggctgggatactaggactcaggtcaaactcagcattttcagtgtgtgggaagtgtgcttgggtttcactgttacttccaataatgtgatttggtccttggggttcaccaaattttggtatggagtggtgaaccctgttaagtttaagtgtctataaaattaacaaagcaaaataaccattctgccccatggttcagagaccaaatattgtgtaggaaatgctttagcgagagaaacagagaagaataaaaaatgtcctcaagcgctgcattatttcttgttatcgtccagatcttagaggaaaggctttcattttccctcattcagtatgatattagctgtgcatctgtcatttatggcttttattatgttggggtatgttccctgtgtatgtagttttttcagggtttttgttatgaagtgatgttgaactttatcaaacgtttttcagtttcagttgaaacgatcatatgctttttgtccttcattctcttgatatgatgcatcatgttgatgatttccatatggtgcactgtccttgcatcctgggcatgaattccacttgatcatgacaaatgaatttttaatgcattcttgaattccgtttgctggtattttgttgaggatttttgcatcaatattcatcagagatattggcctgcagtttctttttttttcttttttctttgttttgttgtttgtttgtttgtttgttttgatgtgtctatgtctggttttggtatctgggtagtagtgttccatccccttttattttttagaataatttgaataagactggtgttggttctttaaatatttggtagaattccgaagtgaagtcattgggccccgggcttttctttagtggaaggctgtttattatggcttcaatctcgttacttattattggtctattcatgttttgaatttgttccttatttaatcttggtaggctgtgtgtatctaggaatttgtccatttcttttagattttcaaatttattggcacataattgcccattgtagcctctaatcgtcatttgagttcctgcagtaccaattataatgtctccttcttcatttttgattgtatttatttggatcctgcccctttttttcttacttaggctgcctaataatttcttaattttgttgaactttttcttttgtttgtctcgctctgccaccaggctggagtgtagtggtgtgatcttggctcactggaacctccgtctcccaggttcaagcaattctcctgcctcaccctcccaaatagctgggactacaggcaagtgccaccactcccagctaatttttgtatttttagtagacacgggttttcaccatgttggccaggatggtctcgatctcttgacttcataatccacctgcctcagcctcccaaagtgctgggattacaggcatgagccactgcgcccagcctaattttgtttaaattttcaagaaatcaacttcttctttcattgatttctgtattttttatttccattttatttatttaaactctaagctttattctatcttcttctcattttagctttggtatgcttattgcctctctagctctttaatgtgcattgttagattgtttatttgaagttcttcctctctacaccataagacgtaagcatgtcctcattatgtcataagatgtaaccacttacagctataaacttccttcttagttctgcttttgctgtatctcataggctttgttatgttgtgtttccattatcaattgtgtcagaaatttttcaatatttttcttaatttcttcattgagcaactgatcatttgggagcatatttttaaacttccatgtacttacatagtttccaaaatacctcttgtgatcaatttctagttttattccactatggttcaagaagatgcttgatattatttcaattttttttcacattttaagatgtgttttgtgacctaacatatggtctactttttttttttattaaactttaagttgtggggtacatgtgtagaccgtgcagttttgttacataggtatacacgtgccatggtggtttgctgctcccattaacctgtcatctacattaggtacttctcataatgctatccctcccctaacctccaccctctgacaggacctggtgtgtgatgttcccctccctgtgtccatgtgatctatttttgagaatgatccatgtggattagaatgctgtggaaaagactttggattcctaatatccagggagggagacgatgatattactttcaatatcacacgggtgtacacactctctgtgacattgttcctaatatccagtggaagagaggatgatataacacccagggagggagaggatgatattactcttaatattgcagggtgtgtacccatgcctatgatattgttcctaatatcaggagggggagaggatgatattactcagaatatggcagggggtgtacacacactctgtgacatggttcttaatatacaggggagaatgggacaatattactctcaatatcgcagggggcgtacaaccctgtgatttgttcctaatatacaaaaggggacagtatgatattgttcctaaaatcgcagaaggtgtacaacgccctgtgatattgttcctaatatccagggcgggagaggatgatattacccccaatatcacagggggtgtgcactttccctgttacattgttcctatgatccgagtggggggaaatgacattagtcccaatatcgcaggatgtgtacactactcccccatgatattgttcctaatatcaagggggagagaggaggatattactcccaatatcgcaagggaggtacatcctccatgcaatattgttcgtaatattcaggaggagagaggaagatattactctcaatatcgcagaaagtggacacccaccctgtgatgttcttcataatatccagggaagcagacgattatatgactttcaatatcgctgggagtgtacatcccttttgggatattgtttctaatatccaggaagggagaggattatattacttccagtattgcagccagtgtacacatttcttgtgatattgttcctaatatccagaaagggaaaggatgatattactcccaatattgcaggtggtgtacacccccctctgatattgttccttacatcaaggaaaagaaagaagaatattactcccaatatcgaagagagtgtacacccctcctgtgatattgtatttaatatccatggggaaagaggatgttgttactcccaatatcgcagggggtttacacccacactgtgatattgttcctaaaatccagtgaaggagaaaataatattgctcccaatattgcagggtgtatacaggccctcccccgttatattgctcctaatatccagcggtggagaggatattactttcaatttttgcagggagtgtgtaccccctctctgatatttttctaatatcaaggatgggaaaggatgccattactcccaatatcgcaggaggtgtacatgccctgtgatattgttcctaatatccagggaggtagaggatgatattactttcaatattgcaggggctgtacaccctctatgatgttgttattaatatttaggttgggagaaaatgatatttttcctaatatcctgggaaggaaaggatgatattactgtaaatattccagggagtgtacaccttcctaatattctaatattgttcctaatatccaggggtgggagaggattatattactcccaatatcgcagtgggtgtacacccctcctgtgatgttgtttctaatatccaagcgaggagaaaatgatatcactctcaataccgcagggggtgtacaccttccccatcatatcgttcctaatattcagagggaaagaagatgatgttactttcaatatcgcaggggttgtacacaacccctgtgatatttctcctaatatccaggaagaaagaggatgatattgctcccattatagcagacggtatacgcctccctgtaacattgtttctaatatcaagactgggagaggatgatatcacttccagtatcgcaaggggtgtacacctcccccgtgatattgttactaatatccagggggaagaggataatattactttcaatattgcaggggctgtacacccccgtgatattgttgttaatatttaggttgggagaaaatgatattagtccaaatatcgcagagagtgtacacacttccgataatattgttcttaatatccatgggggagacgatgatattacacccaatatcgcagggggtgtagtctccccttgtgatattgtccctaatattcagggaagtaaacgatgatgttagtgtgaatattccagggagtgtacaccccctttgtgatattgtcctaatatccgcaggagagaagataatattactcccaatatcgcagggggtgaacacaccccctgtgatattgtttctaatatccaagcgaggagaaaataatattactcccaatgtctcaggggatatacaccttccctatgatattgtttctaatattcaggtggaaaacgggtgatattactcctaatatccaggaagaaaggggattatgttactccccttatagcagggggtatacacctcccctgtaatattgttcctaatatcaaggctgggatatacgtggggggaaggatgatattactcccaatatcacaggggttataaaaccttctgtgatattgctcctaataaccatggcggaagaagatgatattactcctaatattgcaggaggtgtacactcccccattatgttgttcctagtatgcagaaaaggagaggatgacattattgccaatatcgcagggtgtgtacaccacccatgatattgttcctaatatttagagggacagaggatgatattactcccaatatcgcagggggtgtacacgcatcccctgtgatattgttcttgaaatcgaggggaaagagaattatatttctctaaatattgcagagggtgtacaccgccccctgtgatattgttcctaatagccgggggcggggggagataattaaattactttcaatatctcagagagtgtacatcccccttgtgacattgttcctaatatccagagcaaaagagaatgatattcctcccagtatcgcaggaagtgtacatttaacctgtaatattgtttctaatatccagggggaagagaatagtaatactcccaatatcgtaggggttgtacaccttttctgtgatattgttgcaaatatttagaagagagagagaatattactcgcaatatcacagggaatgtatacttcccctgtgatattgttctaatatctagaaaaagagaggataatattactcctaatattgcagggggtgtacacccccacttgtgatattgttcctaatataaaggaaggtcgaaaaacaaacggggagcccagggggaaggaaggcaggcgaggaagaggcagcgccggggcgccggagggagcagccgggccgcggaagcgcgagcacgagaccggtcgcggtcgcagtcgcatttttgccgttgtcgcggccgccgccgccgaggcttacccggggatgtctgagcccgcgcctcgcggcccccaagctccacgctgcgcccgctgtcccggcctctaagggccgccacgtccctgcggcgcgcgcaggcagaaagcggcttcgtgccggcggagggggcccgggcgggccgggaaaggctgccccaggccccgcgcctaccccatcaccgcggccggcgccgggccgggaggatgagcggtgtggggctctgaagcatggagggggttttgtacaagtggaccaactatctcacaggttggcagcctcgttggtttgttttagataatggaatcttatcctattatgattcacaagatgatgtttgcaaagggagcaaaggaagcataaagatggcagtttgtgaaattaaaggtgacagctttggaggggaccacccttgattggatacataaattctgttcattcagcagacaacacaagaatggaattaatcattcctggagagcagcatttctacatgaaggcagtgaacgcagctgaaagacagaggtggctggtcgctctggggagctccaaagcatgtttgactgatacaaggactaaaaacgaaaaagaaagaagtgaaaccagtgaatcgctgaaaaccaaaatgtctgaacttcgcctctactgtgacctcttaatgcagcaagttcatacgatacaggaatttgttcaccacgatgagaatcattcatctcctagtgcagagaacatcaatgaagcctcttctctgcttagtgccacgtgtaacacgttcatcacaacgcttgaggaatgtgtgaagatagccaatgccaggtttaaacctgagatgtttcaacggcaccatccggatcccttagtttctcctgtgtcaccttctcctgttcaaatgaggaagcgttctgtcagccaccctggttcttgcaccagggaggagtagccactgtataaaagaaccagtatctgcacttcaccgactctcccagcgacgccgaagaacctactcagatacagattcttgtagtgatattcctcttgaagacccagatagacctgttcactgttcaaaaaatacacttaatggagatttggcatcagcaaccattcctgaagaaagcagacttatggccaaaaaacaatctgaatcagaagatactcttccatccttctcttcctgaagaaactgtagtgtccaactttctctaagtattgctatgcaaaagctgctgtaattgaactattgttatagggagtagttttttcccttaggactctgcactttatagaatattgtaaaacagacaaacaagaaaacaaaccacatacttttgaagcgtgttttatctttatatagtttgtttgcaagagtattttcctaataacttcacagtatgaatgtgcatcttttttttctttttttaacaaatgatggtgtaacattttgacatccataaggacaaatgtagatatttttctaaaaaaccgtgaggggactgacagcttggtcagggtgtattgtagcttataaacatgaaatcttacaaggtttcagtttgacagaagtgtgatatatgtaacttgtgccatggaccaaatggtcactttaccacagctaaaaatgagttatgatagcagcttgatggtgattgcattgtattcctttaatcaaaaaggaaacgcaatattctaagtatctttagcccaaataccatgacatattgagcatctttaaataaccagactgtattgtccttcatatgtgaagttgacactactgatttgtcaataccaaattttgggttaaagtgtttaatttttatttatttattttcttgttgcctcaaaagatgattgcattctaacttttgtgacctaccaaatttaagatgtgtatacattgttctttacgttgttctagaaaagagattttaatgctgtagtgacttagctcacttacatcagagaaataaacaactttcaatggaaaaaaatatatataaaggaaggaagaggatgatattacttctcatatagaaggggttgtacaccccccttgtgatattgttcctaatattcagggagggagaggattatattactcccaatatagcagggagtgtacacccccccccccgtgataatgttcctaatattcagggaagcagaggatgatattactttcaatatcacagggggtgtgctgtccccctgttatattgttcttaatattcaggggggagaggatattattatgcccgatatcacaggagaagtacaccccacaagtgatattgttcctaatatccaggggtaaagaggatgatatcgcaggtggtgtacacccctccccgtgatattgtttctaatataaagaaggagagagcatgatattactcccaatatcgctggaggtctacaccccccttgtgatactgttcctaatatccaggaagggaaacaatgatattgctgtgaatattccagggggtgtacacccctttgtaatattgttcctcatatccagggggtagagaggatgatattactcccaatatcgcagggggtgcacggccccactgtgatattgtttttcatatccaggaggggagaggatgacattactctcaatatggcagggggcgaacaccccctgtgatattgtgctagttaggttgggagaaaatgatattactcccaatatcgcagggggtgtacaccgctcctgtgatattgttcctaatatccatgacgggagaggatattactcccaatatcgcagggggtgtacctctcccctgtgggattgttcacagtatccaaaagggaagaggatgatgttactcccaatatcacagggagtgtacaccaccattgtgatattgttcctaatagccagggaagaaaacgatgatattattgtgaatattacagggggtgtacacaccccctgtgatatggtttttaatatacaggttggaaaaggatgatattactcccaatatcacaaaaggtgtacacacccccccatgatattgttcttaatacttcggtggggagaaaatgatattagtctccatatcacaggggtgtgaactcctccggtgatattgtttttaatatcaagaggggaggagatgatattgctttcaatatcgctgggggtgtacatccctcctgtgatattgttccttatatccaggcgaggggaaaataatattactcccaatagtacacaccccatgtggtattgttcctaatactcagggggaaagaagataatattactttcaatatcacagggtttgtacacctttcctgtggtatagttttcaatatccagggggaaggtacatgatattactcccattgcagcaaggggtgtacacacctcctgtgatattgttcctaatatccagaagtggtgaggatgatattactcccagggggtgtacaccccacctatgatattgtttctaatatccaggggaaaagagtgtgatattatgcccaatatcgcagagggtgtacacttatcctgggatattgtttctagtatttggggagggaggagaggatgctattattctcaatatcgcagaaattgtacacccccgctgtgatattcttcataataatcagggaaaaagaggatgatattactaccaatattgcagggggttacacttcccctttggtagtgttcctaatatccaggaagaaagaggatgatattaatcccattttccaggaagtgtacacccaccgtgtcatgttgttcctaatatccagcagggaagaggatgatattactcccaatatcggagagggtgtacacttcccctgttatattgtttctaatacccagggggaagaaggatgacattactgccaatatcacagggtgtgtaccccaccctgctattgttcctaatattcaaaaggaaagatgaaaatattactcccaatatctcagggtgtgtacacctctcctgtgatatcgttcctaatatccacaggaagagagaatattactctcaatattgcaggggggtgtacacccccctgtgatattgttccaaatattcgggcggggagaggatgatattagtcccaatatcgcagggggtgtgcaccaacctgtgatattgttcctaatatccatgcgggggaggacgatatcactctcaatgtcgcaggaagtgtacacctctcttgttatatttttcttaatatccaggagggaaaagatgatattactgccaatatcgcagggtgtgtccaccccccttttatattgttcctaatatccaatggaaaagaggatgacattgctctccatatcccagaaggtgtacaacgcccctgtaatattgttcctaatattttgggggaagagaggatgatataacttataatatcacaggaggtgtacaccacccctatgtattgttcctaatatcctttaagggagaggatgatattactcccaatatctcaggtggtgcctattccccctgtgatattgtttttaatatccaggggaagagagtatgatattacgcccaatatcgcagggggcatacaccctctctgagatattgttcataatatatagagggagagaggatgatattacttccaatatcagaggtggggtacaccccccggttatattattcttgatatccaggaggggagaggttgatattactggatatatagcagggagtgttcacatcttctgtgatactgttcctaatatccagaaaagtagaggatgatattactcccaatatcgcagaacgtgtacacctccctgtgatattgatcctaacattcaaaggggagaggatgatattactcaaaacatcacagggcatgtacactcccctgtgatattgttcctagtatccagaagggagcaagataatattactttcaatatcgcagggggtgtacacccctctttggtatgtttcctaatatccagaaggaaagagggtgctattactttccatattgcaaggggtgtacacccccctgtggtatggttcataatatccagggagggaaagggtgctattattccccatatcgcgaggcatgtacaccctgctgcggtacggttcctaatatccagggggaaagaggatgctattacttcccatatcgcggggtgtgtacacccccgtgtggtatgttttgtaatctccgggaacgaagagggtgttattacccctcatatcgctggaaatgtacactcccctgtggtacggttcacaatatccaggggattgagggtgctattactccccatatcgcggggggagtgcacctccctgtggtatggttcgaaatatccagggtaagagagggtgctattattccccattttgcaggaggcgtacacccctctatggtatgttttgtaatatcccaggtaaggggtgctattgagagaagagagcaaaagaccccccccatattgttctgtattattttatactcagtacctgttttaagaagaaacaaggaagcgaaaccaaaggcaggcagcccggcgccaggcaccagatccaaaaccagacccgaaaccaggcctgggccttcctgaccttagcctgaaagttaaaattcaacccatgacctagcaactgatgttatccatagattccagacattgtatggaaggacattgtgaaatttcttgttctgttctgtttcactctgagtactggtgcatgcagcccttgtcacatacccactagattgctcaatcaatcatggccctttcatgtaaaaaccttagtgttgtgagcccttaaaaaggacagaaattgtgcactcaacaagcttggattttgatactctagtctgctgatgcttccagctgattaaaagccacttccttcactacctcggtgtctgtgggattttgtccgcggctcctcctgctacactgtgactccccttatagagaggggtgtacacccccctttggttcctaatatccagcgggggagtaggtgctattactccccatattgcggggagtgtacacccccttgtagtacggatcgtaaaatcaaggagggagagaaggtgtaattatccccatatcacagggagtgtacacccctttgtggtatagtttgtaatatccacgacgggagagaatgctattactccccatatcgtggagggtgtacaccgccctgtagtatggttcgtaatatccggaaggggagaggttgctattactccccatatggtgggaagtgtacacccccatgtgatatggttcataatatccaggggggtagaggatgatattacccacaatatcatagaaggtgcacacccttttgtgatattgtccataaaatccagaaggggagaggatgatattacttccaatatcacagggggtgtgtagccccatatgatattgtttgtaatatcaaggtagggagaggatgctattccttacaatagctcaaggggtgtaaccttcttgtgatattgtttgtaatatccagaaggggagaagataatttttttattttaaaagtaaactttaatgtcaaaaatgcaaacttgagaagggcagaaagatcaaacagaaggctgccacttcacaattggagggttgcacagtggccgggcagaggcgctcctcactccccagacggtgaggcagccgggcagaggtgctcctcacttccgagatgttgcaggagccgggcagaggtgctcctcacttcccagaacagggggctgccgggcagaggtgctcctcactgcccagacggtttgcaggcctggcagaggcactcctcacttcccaaacggagcagcggcaagccagaggcgctccacacttcccagatggtggggcagccgggcagaggcgatcctcacttctcagagggtagggcggcccagcagaggcgctcctcacttcccacatggtggggcggcaggctagaggcgatcctcacttcccagacggtggtgtggccatgcagaggtgctcctcacttcccagatggtgtggccgccgagctgaggcactcctcacttccctgacagtggggcggctgggcagaggcgctcctcacttcccagacacttggactccgggcagagactctcctcatttcccagatggtggggctgccgggcagaggcgctcctcacttcccagacggttcagaggccgggcagaggcgctctggggagaggataatgttactcccaatatcgcagggggtgcacactccctgtgatattgttccgaatatccagagggggaaaggatgatatagctcccaaaatcgtggggagtgtacacccccctgtgatcttgtttgtaataccaagaagaaaagagaatgctattatttccaatatagcagggggagtacaaccccctgtgatattgttcgtaatatctagggggagagaaaattatattagtcttaatatctcaggggacgttcatccccctgtaatattgttggtaatattcagaatggagaagatgatattgttcttaaaatacaggaaaaaatatgataatattacttccaatatcgaagggggtgtacactctcctgtgatattgttcccaatatccagaatgaaagaggatgctattactcccaatatcccagggagtgtacacccctttgccatattgttcataatatccaggggaagacaggataacattactcccaatatcaccgggggtgtccacccactagtgatatttattgttcatcatatccagaaaaggagaggatgatattactcccaatattgcaggtggtgtacggtccctgtgatattctttgaaatatctagaaaaggagaggatgatatcactccgagtatcacagggggtgtacacccccctgtgatattgttcgtaatatccaggggagaaaaggatgatataattgccaatatttcaggggatgtgcacctccctgtgatattgtttgtaatatccaggggtggagaggatgatattactcaaaataacgtaaacatcctgtgtgtacatcccctgtgatattgtttataatatccaggggggtagaagatgacattacccccaatatcacagagtgtacacacccctgggatactgttcataatatccaggcgggaaagaatgaactacttccaatatcgcaggatatgtacacccccctgtgatatatttcctaatatttatgtgggtaaggatattacccccaatatcacagaaggtgtacatcctctttgtgatattattcctaacatccaggaaaggagagaatgatattactcccagtatcgcagggggtgtacaccacccctgtgatattgttgctaatatccagggggagaggataatattactcccaaaatcacaggggacgtacactcctcctgagatattgttcctaatattcatggggaaaagaatgctactactccaaatacagcagagggtgtacaccatccccgtgatattgttttttatatccaaagggtgaaaggctgatattactcccaatatcgcagggggtgtacaggccccccatgatatcattcttaatatccagggaggcaaagaatgatgttactcccaatattgcaggctgtatacaccccccgtgatattgttcctaatatccagagtaagagaggatgacattgctcccaatattgcaggggttgcacgcacgccctgtgataatattactcccaatatcaacagtgggtgtacactcctcctgtgatattgtttgttatatctaagaaagaagaggatgatattactgtcaatatcacagaaggtgtacagccccttgtgatgttgtttctaatatccagcggtgagaggatggtattactcgcaatattgtagggggtgtccaacggccctgtgatattgtttctcatattcaaaaaggaaaagaataatataactccaaatatcgcagggtgtgtacacttccctgtgatattgatcctaatatccaggaagagagaggatgatattaatcccaatatcacagggggtgtacatcgcttctgtgatattcttcctaatatccagggggggaggggatgctattactcttaaaatcgcagggaacttacactcccactatgatatttttcctaatatccaggaagggagaaaatgatattactcctaatatcacatatcacaatgggtgtacatctccccgtgatattgtttctaatatcaaggatgggagaaaattatattactctcaatatcgcagggggtgtgcacacctcctgtgatattgttcctagtatccagcggaggagatgatattactttaaatattgtagaaggtgtacaacccccctttgatattgttcctaatatccagggggaaaggagatgatattactcctaatatcgcaggggctgtacaaccctatgtgatattgtttcttctaatatccaggggtggagaagataatattactcctaaaatcgaaggggacatacactccccctgtgatatttttcctaatatccagaaggaaagaggatgatattactcctaatattacaagaaatgtatacctgtcctgtgatattgttcctaatatccagaggggtaaatgattatattactcccaatatcgcaggggtgtacaccttccctgagatattgtttctaatatgcagtggaggagaggatggtattactcccaacatcacaggagatgtaaactccccttgtgatattcttcctaatgttcaggacgaaggagggtaatattactcactgtattgcagcagggggtgtagagccccctgtgatattgtttttaatattcaaggttggagaaaataatattccttccaatatcgcatggggtgtacacccttctttttatatagtttctaatatctggggggagaggatgatattactcccaatatcgcagggggattacacccccactgtgatattgtttttaatatccagggtgggagaggataatattactccaaatatcccagggctatacaccctccgtgtgatattgtttctaatatccagaggaagagaagatgatattactcccaatgtcacagggtgtgtacaggccttctttgatattgttcttaatatccatgagggagaggatgatattactcccaatatcgcaaagactgtacaccctttctgtgatattgcttccaatatccagggagggagaggatattacactcaggatcacagggggtgtacaccccaacctgtgatattgtttctaatatctagggaaaatgagggtgatattactatcaatatcacaggaggtgtacactcccttatgatattgttcctaatatccaggagaatgacaggataatattactcccaatatcgcgggtggtgtctccccccactccgtgatattgttcctaatacccagagggggagagaatcatattactcccaatatcgcaggggatgtacacctacatccggcggagtagaagataatattactcacaatatcgcaagaagtgttcaccttccctgttatattgttgctaatatccagggagtgagaagatgatattactttcaatactgagcgtgtacactacccctgtgatattgtttctcatatccagtagaggagaaaatcatgttactcccaatattgcaggggtgaacacctcctttgtgatatttttcctaatatcaggaaagggagagtatgatattacccttaatattgacaggggtgtacacccccctttgatattgttccaatatccaggggggcagaggataatattattcccaatatcgcagagggtgtacaccccccgtgatattgttcctaatatccagagaaataaaaaatagtattatttccaatatcacagggcgtacattttccctgtaattttgttcctaatatctggggggtggggtggcaggataatattactctcaatattggagagggtgtacacccccctgtgatattgttcctaatattcagggtgggagagaatgatgttactcccaatatctcaggagtcgtatacacccccttgtgatattttttctaatatccaggaggcagaggatgatattgctcccaatatcgcagggggtatacacccgagctgtgatattgtttctaatatgcaatatgggggaaggatgattttactttcaatatcgcagggaatgtacactttccttgtgattttgttcctaatatccaggggtggagaagatgctattactatattactcctcatatcgcaggcggtgtacaactccctgtgatatggttcagaatatccagagtgaaaaaggagggtgacattactcccaatatcgggggggtgtacacccctttgtgatgtggttggtaatatccaggggggcagatgagggtgatatcactccccatatcgtggaaggcgtccacttttttgtgatgtggttctttatatcccgaggggagaaggtgatattactccccatatcgcgaagggcatacacccccctgtgatatagctcataatattccggagagtggaggaagatactatgccctatatcgcgggtggcctacaaccccctatggtttggcttataatatccaggggggagagggtaatattgctccccatattgtggagacgtacagccccctgtgatatggtttgtaatatctttggggggcgagggtgatattactccccatatcgcggggagcatacacccccgtgatctggttcatagtatctcaaaggaagaagttgatgtgtacaacttaagggaaaaagttgaagtgaagtgtacacacgccctgtgacgtggttcataatatccaggcgggggagaggagagtgatatttactccccatatcgcgggtgttgtaaactcccctgtgatatagttcataatatccaggggagagaggagggtgatattgctcctcatatcgcgaagggtgtacaaccccctgtgatatggttcataatatccagaagggtagaggacgatgatattactccacatatcttgggaggtgtgatatggttcgtaatatccagcgatgagagaatgatattactccccatatcgcaaaaggtgtgatagggtttgtaatatcctgagggggagagggtgatattaatccctatattgcagaaggactacaccctcccatgacatggtttgtaatatcccagggggtagagtgtgatattactttccatatcacagggggtgtgatatgattcgtaatattcgaagggggagagggtgacactactctccatatcacggggtgtgtgatatggttcttaatatcccaggggttagaggttgatattaccccctttttggggggtgtgtacaccccctgtgatatggttcgtaatatcccgggggagacagggtgacattattccccatatcgaggggatcgtacaccccctgtggtgtggttcataatatccctagggggagatggtgatattactccccatatcagggggcgtgcactcttctgtggtataattagtaatatccagggggcagaggtcgatattcgtttccatatcatgaagggagtacacttccctgtgatatggttcctaatatccaggggggagagggtgatattattccccatattgcggggggacatacaacccctgtgatatggttcataataaccagaaaagaagagggtgatattaatccccgtattgcagagggcatacaccccccctgtgatatggtttgtaatatctaggggaggaaaaggtgatattactttccatattgctgggtgcagacacccctttatgatatggttcataatatccaagttggagagggtgatattacttcccatatcatgggaggtatacccttccctgtgatatggttcgtaatatccagaaggggagagattgatattactccccatattgtggggggcgtacaccttcctgtgatacggtttgtaatatctaggggatatagtgggtgatattactcaccatatcacgggggttgtaacatggtttgtaatatccaggggaggagagggtaatgttactccccatatctcggggcatgtacaccctcctgtgacatggttcgtaatatccaggtcgggagagggtgatattactcctcatattgccgggggtgtgttatggttcataatatcctggggaaggaggctgctatcactctccacatcttgggggatgtacactctcctgtgatatggttcataatatccagggtgggtgagggtaatattactccccatatcgcgggaagtgtacatacccctgtaatattgtttgtaatagaagagagggtgatattactccccacatcgcgggtggtgcccacccccctgtgatatggtttggaatatccagggggatgaggagggtgatattactccccatatctcggtgggagtacatccctctttgatcaagttcataatatccaaaaggaaacaggagagtgatattactccccatatcgccgggggtgtacacgggagggggagtacacccccggcgatatggtctgtaatatccagggaaggagaggagggtgatattactcaccatatcgcaggtggtctacatttacctgtgaaacagtttgtaatatccagggggggaaatgagaatgattttttttttttgagtctcactgtgtcacccaggttggagtgcagtggcacgatcttggctcactgcaacccccgcctcctggactcaagcaattctcctctcccagcctcctgaatagctgggactacaggcgcaccccacaacgtctggctaatttttgtatttttattagagacggggtttcaccatattggccaggctgatctcgaactcctgaccctgtgatccatccgcctcggcctccaaaagtgctgagattacagatgtgagccaccacgcatggcccaaggagaacgatattactccccatatcccagggggtgtatatccccctgtgatatggttcagaatatccggaaggaaagacagggatattacttcccatatcgcaaggggtgtgacatggttcgtaatatcccatgggggagagggtaatattactcttcgtattgtgaagggcatacactcccctgtgatacagttcataatattccggggagtagaggaagatattatgctccatatcgcgggtggcataagccccctgtggtttggttcataatatccagggaggagagggtaatattactccccatattgtggggacgtacaccctcctgtgatatggtttgtaatatcccagaggggagagagtgatattactccccatattgcagggacatacacccccctgtgatatggttcaaaatgtcttttttttttgaaggactggttctttatttcaaaaagacacttgtcaatattcattatcaaaacagttgcactattgatttctctttctcccaatcggccccaagtagaccacatcaaaggagagtacatattaagccaataagctgtaggatgtacacctaacagacctcctagaaaccttaccagaaaatggggacagggtagggaaagaaactttaaaagatcaacaaactgccagcccacggactgcaggggctgtcacagccagatggggtggccagggtgccacaaacccaaagaagcaaagtttcaaaataatataaaatttaaaaagttttgtacataagctattcaagatttctccagcactgactgatacaaagcacaatgagatggcacttgtagagacagcagcttcaaactcagaaaagggtaatgagatgagtttcacatggctaaatcagtggcaaaaacacaatcttctttctttctttctttctttcaaggaggcaagaaaagcaattaagtgctcacctcaacataaggggaacatgatccattctgtaagcagttgggagggggtagagatggaacaaaattttggtctcagaggtcttgccatcttaatttggtcacttctaatgaaaaaaataaaaaatagaaataacattatccaaaggtatcttaaagctgaaaacttgaacagcacattttttgttgttgttgtttggctaactcctcctggaaccacctttctggcttagctagtactttgtacagagcaatgaggcttcccatagtggagtctccctgggctctgtttggctctcagcaaggcaggcctataccttttcctctcctccatggagagaggaatatgcattaaggtgaaaaatcaccttccaaaagtgagaaagggattcgatcgctgcttcagggctgtggtattatatggaatgttttacaaaaggttgctacaaaacaacaaaagaggtaattacaaaatgtgtacatcacaacatactttttaaagacattatgcattgtgctcacattcccttaaatgttgtttccaaaggtgctcagcctctagcccagctggaatctccgggaagaggcggacagtttggtgaaaaagacacagggaaggagcgggcggcggaaggagggggcggcgaaaggagaaagcagccttccagttaaagatcagccctcaattaaaggtcagcttcgggcaggctggcctcaggcggagtctggttcagagggaggagcagcagcagggtgagactgaggcgttctacatctcattcaggtcaagcagagtctggtccagcatcctttgtgtacagaggtgctcccctttggtgcatttcagtttatcttccaagtcatcaattgtcttttccagcttggctaccgatctctcagcaaactcagcatgggtctccgcctcctttattttatcagtaagaatcttgatctcttcctcatatttgtcttctttttgagagtacttttcttcagcagcactcagacacttcaggttctggtccatcagtctaatctgctcatccatctctcggcaaagggattctgccagctcagctcgttcctctgtgcgttccaagtctccttcaatgatcaccaacttacgagccacctcttcatacttcctatctgcctcttctgcaatgtgcttagcttctctgagttggatttcctggagttccatcttttcttcatcttttaaggcccggttttcaataaccttcttacctctctcactctcatcagcagctttttccgcttcttccagcttttgcagggcagtagccaggtgctcctgagcacggtccagctcctcttcaaccagctggatcccacgttcaaggaggccacctcagcctcagcctgttcccgggcccacctttctccctcaacttctcgctggaggcgctcagctcgctcctctgcatcatctgcctgctgctgcagaacctggatcttgcgcttcaccgcctcgatggtggtgatcccagccatggtgcccacccagctactgctagagctccggttcctgcctcctccgatcggcgttgcagcctcctctcacccttacttccgcctcggttcaaaatatcttaagggaaggagttgatattactccccacatcacgggaagtttacatcccctggtgatatggtttgtaatatcccagggtggatagggtgatattactctccatatcgcgaaggagtactcccccctgtgatatggttcataatatccttggggggagagtgtgatattactccccatatcgcgagggccatatactcctttgtgacatggttcgaaatatcccggtgggggagggggtagagggtaatattactccccatacagcgaagagcatacgcccttctgtggcaaggttagtaatacttcagggaaaagagtgcaatattacttttcatattgcagggaacatacactcccctgtgacatggttcgtaatatcccgggggctgagagggtgatatttctccccatatcaccgggggcctacacctgggtgtgatatggctcataatatacagggagggagagggtgatattactccacataccgagtgaggggttacacaccctcgtgacatgttcgaaataccccaaggaggagacaatgatattactttccctgtcgcgggggctacaccctcccagtgatatggttcacaatatcccggggtggagagggtgatattactccctatatcaccggggggtgtacacttccctgggaaatggtttacagtatccccggggggagagggtactattactccccatatcacgttacatatcagggtacacccccacgtgatatggtttgtaacatcccaggaggaagaaaatgatattactccccatatcgcggtggcatacacccctccccgttaaatggttcataatatcttggggtggagagggtgatattactccccatatcacgtggggcatacaccccactatgatatggttcataatatcccggaggggagagggagatattactctccatgtcgcggggggcatatacacccctgtgatatggtttgtgatatcccgggggcggagagggagatattactctccatatcgtggggtcgtacacttttctgtgatatgattcgtaatatccagacggggagagggtgatattacttcccatattgcgggggcgtacacccctctgtgatatggttcataatatcccgaagaaaagagggtgatattactcctcatatcgcggggaacacacaccaccctgtgatatggtttgtaatattcagcgggggagagagtaatattactccctgtatctcggatggcgtacactcccctgtgatatggttcataatatccagaagaaaagagggtgatattactccccatattccagggaatgtacaccaccctttgaatatggttcgtaatatccaggaggggagagggtaatattgctcccaatatcgaaggaggtgttatacggttagtaatatccagagaaggagagggtgacattactccccacatcgtggtgggtgtgcacccacctgtgatatggttcataatattcaggttaagagaggtgatattgctttccatatcgccaagggtgtacactcccgtgaaatacagttcgtaatatccaaaaggggagagggtgatattactcccatatcgtggggggtgtacacccctctgtgatatggttcataatatccagggtggaataaggtggtattactccctgtatctcggggcatgtacatcgcctgtgatatgattcataatatccagaagaagagagggtgatattaatctccatattgctgggggtgtacaaccccctgttgtatggtttgttacactgagttggggagagggttacattactctcaatatcgagtggggcatacacacttatgtgatatggttcataatatcccagggaggagagggtgatattactccccatatcgcgggaggcatacaccccaatgtgatatggtttgtaatatctacatttttttttttgagacgaagtctcgctcttgtcccccaggctggagtatgatggccggatctcggctcactgcaacctcagcctcccgggttcaagcgattctcctgccttggtcccccaagaagttgggattacaggcgcacaccaccacgcccggctactttttgtatttttagtagagaaggggtttcaccatgttggccaggctggtctagaactcctgacctcagatgatccacctgcctcggcctcccaaagtgctgggattacaggcgtgagccactgcacctggcctggtttgtaatatctatgaagggggaaggtgatattactttccatatcacgggaggcgtacaccacgatgtgatatggtttgtaatatccagggggtatactgggtgatattactccccatatcgcggggagtgtatacccttttgtgatatggttcctaatattaagctgaggagaaggtaatattactccccatatcgcaggggtttttatatggttcataatattcaggaagagagagggtgacattactctccatatcacggggtgtgtactcccccatgtgatatggtttgtaatatccagggaaggagaggttaatattactccccatatcgcagggggtgtacacctctctgtggtttgtaatatccaaagggaagaggatgatattatcttcaatatcttggggggatacagtccccagtgatattgttcataatatccagagggggaggggatgatattactcccaatattgcaggtggtgtacaaccccctgtgatattctttataatatagagggggatgatgatattactcccaatatagtaaacaacctgtgtgtacaccccctgtgatattgtttataatatccaagggtggaaaggatgatattactcctcatatcgcagggggtgtatacccctctgtgacattgttcctaatattcaggggaggagaagatgatactactcctcatatcacaggggatgtacacccccctgtgatacttttggtaatatccaggggaggagaaaattatattattccccatgtcacagagggtgtacaccccgctgtgatagtgttcataatatccaggtgaaaagaggatgatattactccgaatatctcaggaagtgtacacccttctgtgatattgttcataatatccaaaggtggagaggaggatactactccccatatcgcagtgggtgtacacccccctgtgatatggttcataatatccaatgtaggagaggatgatattactttccatatcgcggagagtgtacatccccctgttatattgtttgtaatattcagggagaaagaggatactactactccccatatcacacggggtgtatattcccctgtgatatggttcctgatatccaagagatattataatcctctcttggattatgctacctctcatatcgcatggggtgtacacacactttgtgatatcgtttgtcatatccaaggagggagaggattatattaatcccaagatcacggggggtgtacaccctcctgtgatattgtttgtaatattaaggggggagaggataatattactcccaatataattaacaccctgtgtgtactcctccttgtaatattgttcataatatccaatgggggagacgatgatattactttcaatatcgcagaggatgtacatccctttgtaacaatgtttgtaatataaaaggcaagagaggatgatactacttccaaaattgcaggacatgtacaccccccggtgatattgttcctaatatccagtggggaagaggatgatagtagtcccaatatcgcaaagggtgtacacaccccctgggatattgttcctaatataaaaggaggagaggatgctattattcccaatatcacagaaggtgtaaaatcccctgtgatattgttcgtaatattcaggaggggagaggattatattactcccaatatcacagggtgtgtacacagggaggggcaagggccagaagcgggcgggaatccccatgtttgggcggacccagtttctaatggccagcatttgccaatcaaagcttaccagagaactctaaaagccagggctttcctgctagacaagactcatttctggaactgctttaaaaagaaacaaaacttcccaaggaccccttttcctctctgtctgcctaaaataatgttttaaaaactcctaaagcagctgaattcagcccccttcctgggggaatgtatagacggaactcccacctttcccggcatcccaaggccagagtatgtgaaactcctgggtctctatgtgtgtctgagcggctgctctgccaacactccacacagccctgtgtcctggacccaaggcccttatgacctgagctcaagaggggatctcctgatccatgggttgcaaagatccatgggagaagcatggtttctggggcggggtcacacgctcagtcactgtttccctcggatgccggagatggttcctttggctctctgccaatacagggtgaatcatcatccatccctcttttctttgttctcccgggtcaagttgtttgcctagtcagtcccaatgtgagaacctgaatatttcagttgacgcgctgacttcaaaatccccgggcttcgggaggcggagcttgcagtgagccgagatcccgccactgcactccagcctgggcgacagagcgagactccgtctcaaaaaaaaaaaaaaaaaaaaaaaaaaaaaagtccccgggcttttcttttcactcagtggaaggcagctgcttctaattggccatcttggcccgcccccaccacgtgaccttctgtaaaatgcctccactctccaggaacgctctcattatataactttgcctgaaaccaacagcacgctcattgcacatatcatgggctcatttatttcacttataaagaacctggccaaggaagagatagtgcctaaagtggccagtattctgaccgatatgttagaaaaatggtgtgccgaccaattcatgacatgtgtcccaaaactagcaacggaaattgtattcgccgtgttgaggtctctaatccagatgatgctcatctatgtactggaaaaggcagagtcctttcctgacaagctgctgaaactcttcagaaacatctcatatttcctgaagaagatgatgtctggacaagcagcacaggtcgttcagatttaactttctattcatatatccagcacgatattcgcacaattgtcacgaaaccttaccagttgatgagtcctgcacatttcctttaatttcaggaggaagagggtaatccggatgagttttctgacctactctgctgctgtgattaaacaaccaccaggaaattttgacgacactgttctcctgagctcctccctttcctccgggaacaaaacaattgaatttacaaaaataaagtgttatttgactggagtgaggtctcatgtctgcttatgcggtggctcgctgctcagaacagggtgagtctctgggttgtgtgctgaggaggggaggctctcaatctggagaaaacccactgcaggggacacctccatggggtctgagggactgaggatgaggagccggactgggtctagggaaggaggaggtttcagagggtgaaattctggcactaaagcctgggggtgtttgggaacttcctccttccgaagaagtttcagggagggataaagacaaaccctgggctccttgaggggcccttactaatttgagaggactctatcgggaaggagagtgacaatggcctccttgaggactgaggcccctgaataaatgaggcccagatacagtccatgggggatgagaccttcaagggtcacattttggttgggacagaggaaaagtgcagctctgcagccgcagaggaaaacccggcagtgtgaaagcgaccttggaggggccctgtgcgctctgaatgcgtctgagcccccatcccctgtccccgcctctctttctggattcttccagctcggctgtctccgccatcttctgagcgctccaccctgacttattcaagtttcccttctgccttccaagtactccaaaatctttcagatctgtgtccctacccctgtttttagcatgtgttggggctccaggtccctgaaggtttctggcctgaaatccacctccccagcggagtggactgcgttctagagactccacactccgcgaggttcccaggcccctgagggacaaccgagtggcctgcgcacttcagggctccacactcggcaaggtctttcaagcccttggggtccccttcttagttttttccacctttctgggctgcagtcactccataaatgctgggatctgatccccacccccactctcgtttcctcaattctgcgggctacacgctctggcaaggtcctccgggccctggatcccctccctctccctatgcccacgctcctagtcagcccttctggggtccactattttcaggaactaaccgttctcatggagccttgctaaccggaaagctgtgtggaagaaaggctttgaggatagaggtggagatttggctcttccatagtgccactcacccaccccaccatgctgccactgccagacccggacccctgtttcagaacaagtgaccagattcgctcctggacagccctggacactggccttttctctgaaaactactcaccctttctctagtccccacttcatgccagcctcataccctcttccttcccccacgctggcttccgggatcctcctctgctcagacaacctcttctgtgtcccacccccgtttttagaatgctttggggcaccaggttgggggaaggtttctggcctgatatccatctctttccaaactcccttcttcccttgaaaggcttcttgccttcagccccacttctggctccgaggtttcaggacaccctcctcttcatcctcattcttttgaccaccagctttttaggaattcgaacgtccctctcatcttcgtgaatcctgtccaggcatttgttgaccccttcatctgatacccctgacctcacattgccaaaagtctacccctacccagtacactggaattagacaaaatcccaggagttttacctcaactctgagtgtgcccacaggagctctccctgaagccacgtccttttaagcagggtctagggttcctcccttgtcttaatgaactctttgtcacacggaggacgttatggagcccttatgatctttcactgcctttctgcccagcgttttgtctttccatggacatttataatattttccatggacattttgttctctcaatgtccacccctaatttccaacatcccaaagattctcatgtgtttcctgaaagccatttacaggaatggctgtgcccagacccccttccccaggatcctccttcacacctggtaggtgcctctcctagagagatttgcactcagttgtcgtgcagtcacatggcccagatggttgttaatcacccccttcctggcaacagctagcagccagggaatcactggcacagaaacctcagggtgaccaagatgaggccacctctgtgctgaaggctgtgctccagagcctgcttgggatcaggcttaagcaggtcttcagccagacctgatgttacctggtttccttgagctgccctgcctgagctatcgggagcactccctcaatgcacatcttgattccctatctcatgctctgcttctagaaaccatgagctatcaattgctactggcaatggtcctgggaagtcaaccctaagtatggattctggggttggatgactccccacaggacttcagtgagcaacaatcactgctggcagttggaggacagagtcgctagggcatgtgaccactgtgaaaccaccgatgtttcacctggggtaattttggatgaactacggtagaagcactgaaggtacattgcttttggtttggaagattgtaggtaaataatagcgatatgaatgtggaattggatggctgcaaacgagtgccattgatgcattgaaagaggaaaagtcaggctgtcacctgtcactcagcaatttaaagtgtgagagttgggactagatgtggtggctcacatctataatccagagattcgggggaagcttgaagaggtaggatcttttgagtccaggagttccagaccagcctggacaccagagcaagacctcatctctacaacaaaattttcttaaaaattagatgggcttggtggcacgcacctgtacttgtagatctagctaatggggagcatgagataaaaaaatcacctgagtcagggacttaggggttacaatgaggtatgattgtgccagtgcacacactcccacctggccaacagagtgagattctgcttccaaaaaaataagaaataaatcaggtttgagagttggaaagcatcatcttctcctagagccaaaggacatgtacaactgagacccaggaacaaagcttcatcacaaagagaccatcatcagtggagccgggagatgcattccccctcaccctgccttgaggaggcagtggagtcatctgtctgggatcctttctgacccagccctatttgtttgtctctttggcttctttggatttgtatattttagctgttataacactgtaaaacaaacagagtgatttttttgagttgtgtgaatgatgctagctccatagtcaccctgagagtgatgggaacttttgaatttgtggcaagttggagggtagtgtaagtgacctgagattgccaaattggggctagcactggatgtgaggttaggctagtggaaaaatatgcccagaaccagaggagtgtgggctcactgcaggtggttaggctcagatccaaattgtacagatggatagctttggggtaaagaataacatagttgagaagtgcatgtgttagtctgttcatgcactgctataaagaattacctgagactgggtaattatttataaaactcaggtttaattgggtcatggttccacaggctgtacaaaaagtatgatgctggccatcagctcaacttctggggaggccccagaatagttagagtcatggcaaaaagtacaagggaagcaggctcatcttccacggccagagctggagcaagtggtaggagaggtgatacacactttcaaacaagtaggtcttttgagaactccatcaccggacagcacctatgggatggtgctaaattattcatgaaatatccgcctccataatccactcaactgtcaccagcgcagccagccccacctccaacagtggggattacaattccatatgaggtgtgggtggggacacagctccaacctcaatcagtgggcatcctggattgggtctactatagaaggagaaccaggagctgactatgatcttgaaccctacccatgatggccgggcggggtgactcatgcctgtaaccccagcactttgggaggctgaggtgggtggatcgcctgaagtcaggagttagagaccagcctggccaacatggtgaaaacctgtctctactaaaaatacaaaaaattagaccggcgttgtgctggatgcctgtaatcacaccactacgctccagcatgggaaaaaataccaaaacttcgtctcaaaaaaaaaaaaaaaaaaaaaaaaaaaaagactgcccatgaccactgcaccagtgagagggacaccagcatcactgagatgcaagggctggacattcttcataggtcagagctcaaagcaggggacactgatacagagatgggctccatccatagcaccaaagtggtgagaggatgtgggaatggcagaggccagcactttgccatcaatgcaagggggtataaggaggtgacaccagtgccagagtacatcacggggggactgccctacaatatctaggacttacctcttagagcgtgtttcattagcgacaacagatataaatggcagacaggtgtgtccctgcattaacaggaaatagaaatcatcaagaggaacagaaggcagatgtcagcagccccttagaaagtcatcatccttcatacagttaaaatctgagacagttctcacacgagaaggcctaactcaaaaagaggctgggttctcatgaggcaggtttatgcaaaaccaaggaaggtgtacaagtttggaattctccagtttcccttggaaaagacctacagtcatttgcttaggtaactgagcactgaacaaaggtgagtattgttgtcttttagaagctcttggccaagaaggccttgttggcataaaacccatggtttggaaacatcaccatgacccctgttagagtaatggcctaagggtgggggtcaggaaattgatgtattccttgccaacttctgcctctaagtgagtgaactctgtttgtgaacctctctcctctgtggttatgttcctaggctctcatgtataatcaggagtcatagacttagaaacaggaaaaatacttacagtgtttttgtggcctgtgagctatgacttataattttaggaaaaaaacaattgcaaatggaaagcctaagtctatcaatgctcatccaagacaacataatcaataaaaaccaatatcaaatctcaaggcaaattatttcctgtatatagatggcagagatgagcaccaccatcaaaaactcaaggaccagtgctgtgggtccagtcatctgtttcatggaattcaccagtctggtatcttcaaaatccagaaggatgatggcagatggcaggaaagtaatgcaaacgtcatcaggtgtgaccccactgtagcagctgtgatggatgttttctctcaccatagcaataaataacacaacctcggtcacactgtatgcattgttggtctgcaaaatccatgttttgcaaaactcttcaggaaggtggatctgtaatattggcattgacatgagaacaacagcagtatttattcacaatctcaagctctctgtcttcccgtctctctcattagccatccaagtagtcctgaggaaccaagcccatcagaacattctgcaacataatacacagctccattctccattcaaattttgttgttgttgttgttgttgatgagacaacatcttactccatcagccaggctgacgtacagtggggctatctgggctgactgtagtcttgagcttccaggctcaaggcatcctctcacctcagcctcctaagtggcttgaactacagacacacagcgacatgctgggctagtttttgtatattttgtagagacgtgctctcaccatgttattcaggctggactcaaactcctgagcgtaagtgatccaagcaccttggcctcaaagtgctgagattacaagcctgagccactgcacccagcccaatctccattctactgataacaatgtcattaccaggtctgatggacaggaaatggtaaggtttctgaaaacctaaggatcacacagcgagttccaaaggctgaaagtgcatacctgtcgacactgataccaatgacatccaatggtgagaatgacattccttgtagtcctagctctgctcataacaaatctatactgaagtgtaagagtttgatggtcatggggattttccatgtctctgcctttcagcgatgtgccatatctgtgaagtgttcagaaatgcaacagcctgaggcatgctgggcatatcctctaataaaaaggaaaatgccattttatggtcctgtatttctacaagttggaacacatgggcctgtgatccagatgggggaaatgggaatattcccactcattcaccttcatccacgaagcccatttgaaagctttgggcttcccatccttgtagattttagtgttgtgggctgggtgcagtggctttcacctgtactgccaacactttgggaggcctagacaggtgaatccactgaggccaaaagttcgagaccagcctggccaagatggtgaaaccccgtccctactaaaaatacaaaaattagcaaggtattggggccagcacctgtaatcccagctgctcgggaggctgaggctggagaatcgcttgaacccaaaaggcagagactgcagtgacccgatcctgcctttgcactccacctgggcaagcagaacaaaacttctgtcttgaaaaaaaaaacaaaaaacgaacaaaaaagatgttagagttctgggtttagaggtctataccccagaaagagaatggtttcaacaagggacaaagaagttgctttaaacgttgacttgccatttcttttcagtgtgtttgttctcttgcgtcaagagaccaccagaaaagtggtgcaattactctcctgtcaagaatcattgactatcatctgcaagagggtcagatcctggtatataattagggcagaaatacttagtctgagaagggtatgacatccagaggccctattaatgatgtccttttctccatgcctgactctgaccccatgtgctggactgcccctgtgtggatggcctcatggcctgctcggactctgaggtcccaccccaagtggcacctccatggagggctctactcttgtatgggctctgacactcacactgagacactctcccatggacacctcttcacccacttggggtctgaaactgggctactccatccctccctaacctggaacagagagctttcactgctattacacaagtcatagaggctaactcctcatttttccaagctaattattgaaacattagtcctgggttgataagacaagataagttaacttttcataaatttgcttatcaagttttgaataaattcaaataaattcaccttccccacacaccttagttgtcgacatcacacgcgcacccatactcacagggtgagcacgaaggcttcactgtcagtggagaaagtggcaaaacccttctgtgcctcatcctggtctagacctggccctcatcctttcccactcttcccctcactcccttggattcatccacactggcctcctgcctgctgctccacctccctgcgaagctcacccctgcctcagggcctttgcacgtgcagtggcttcaagccatatcctcttcacccagatctcccagatctcctgaatgatcttcttttatcattcaggtctcagcttgcatgtaatcttctcagtgaggattacccaaaccacatagttcattcattcattcaaatattcattcaatggcatattgacaaagcagctacttcatgccaggccttgggccaggtgttatggatatggcaacaaacaaaacaagagttttctgctctcaaatttttacccacttaaaggagatatcatacatcatctgtaaataaatacatcatctgtaaataatgatgtaaataaatacatcatctgtaaatctgtaaataatgatgtaaataaatacatcatctgtaaataaataaagtataataaaagaaaatagtaggtttttttggttggaggtgaccgtgaagtttgcaaataccatcttacaacacattattttattttatttcatttcatttttaattttattattattatactttaagttttagggtacatgtgcacaacgtgcagatttgttacatatgtatacatgtgtgaagttggtgtgctgcacccattaactcgtcatttagcattaggtatatctcctaatgctatccttcccccctcccccaccccacaacagtccccggtgtgtgatgttccccttcctgtgtccatgtgttctcattgttcagttcccccctatgagtgagaacatgcggtatttggttttttgtccttgtgatagtttgctgagaatgatggtttccagcttcatccatgtccctacaaaggacacgaactcatcattttttatggctgcatagtattccatggtgtatatgtgccacattttcttcatccagtctatcattgttggatatttgggttggttccaagtctttgctattgtgaagagtgccgcaataaacatacgtgtgcgtgtgtctttatagcagcatgatttataatcctttgggtatatacccagtaatgggatggctgggtcaaatggtatttctagctctagatcactgaggaatcgccacactgacttccacagtggttgaactagtttacagtcccaccaacagtgtaaaagtgttcctatttctccacatcctctccagcacctgttgtttcctgactttttaatgatcgccattctaactggtgtgagatggtatctcactgtggctttgatttgcatttctctgatggccagtgatgatgagcatttcttcatgtgttttttggctgcataaatgtcttcttttgagaaatgtctgttcatatccttcacccactttttgatggggttgtttgtttttttcttgtaaatttgtttgagttcattgtagattctggatattagccctttgtcagatgagtaggttgtgaaaattttctcccattctgcaggttacctgttcactctgatggtagtttcttttgctgtgcagaagctctttagtttaattagatcccatttgtcaattttggcttttgttgccattgcttttggtgttttagacatgaagtccttgcccgtgcctatgacctgaatggaaatgcctgggttttcttctagggtttttatggtttgaggtctaacatgtaagtctttaatccatcttgaattaatttttgtataaggtgtaaggaagggatccagtttcacctttctacatatggctagcctgttttcccagaaccatttattaaatagggaatcctttccccacttcttgtttttgtcaggtgtgtcaaagatcagatagttgtagatatgtgacattatttctgaggactctgttctgttgcattggtctatatctctgttttggtaccagtaccatgctgttttggttactgtagccttgtagtatagtttgaagtcaggtagcatgatgcctccagctttgctcttttggcttaggattgactttgcaatgcggggtcttttttggttccatgtgaactttaaagtagttttttccaattctgtgaagaaagtcattggtagcttgatggggatggcattgaatctataaattaccttgggcagtatggccattttcacgatattgattcttcctacccatgagcatggaatgttcttccatttgtttgtatcctcttttatttcattgagcagtggttttagttctccttgaagaggtccttcacatcccttgtaagttgggttcctaggtattttattccctttgaagcaattgtgaatgggagttcactcatgatttggctctctgtttgtctgttattggtgtataagaatgcttgtgatttttgtacattgattttgtatcctgagactttgctgaagttgcttatcagcttaaggagattttgggctgagacaatgggttttctagatatacaatcatgtcgtctgcaaacagggacaatttgacttcctcttttcctaattgaataccctttatttccttctcctgcctaattgccctggccagaacttccaacactatgttgaataggagtggtgagagagggcatccctgtcttgtgccagttttcaaagggaatgcttccagtttttgcccattcagtatgatattggctgtgggtttgtcatagatagctcttattattttgagatatgtcccatcaatacctaattattgagagttttcagcatgaagggttgttgaattttgtcaaaggccttttctgcatctattgagataatcatgtggtttttgtctttgggtctgtttatatgctggattacatttattgatttgcatatattgaaccagccttgcatcccagggatgaagcccacttgatcatggtggataagctttttgatgtgctgctggattcggtttgccagtattttactgaggacttttgcatcaatgttcatcaaggatattggtctaaaattctcttttttggttgtgtctctgcctggctttggtatcaggatgatgctggcctcataaaatgagttagggaggattccctctttttctattgattggaatagtttcaggaggaatggtaccagttcctccttgtacctctggtagaattgggctgtgaatccatctggtcctggactgtttttggttggtaagctattgattattgccacaatttcagatcctgttattgctctattcagagattcaacttcttcctggtttagtcttgggaaggtgtatgtgtccaggaatttatccatttcttctagattttctagtttatttgcgtagaggtgtttgtagtattctctgatggtagtttgtatttctgtgggatcagtggtgatatcacctttatcattttttattgcatctatttgattcttctctctttttttctttattagtcttgctaccggtctatcaattttgttgatccttttaaaaaaccagctcctggattcattaattttttgaagggttttttgtgtctctatttccttcagttctgctctgattttagttatttcttgccttctgctagcttttgaatgtgtttgctcttgcttttctagttcttttaattgtgatgttagggtgtcaattttggatctttcctgctttctcttgtgggcatttagtgttataaatttccctctacacactgctttgaatgtgtcccagagattgtggtatgttgtgtcttttttctcgttggtttcaaagaacatctttatttctgccttcattttgttatgtacccagtagtcattcaggagcaggttgttcagtttccatgtagttgagcggttttgagtgagtttcttaatcctgagttctagtttgattgcactgtggtctgagagacagtttgttataatttctgttcttttacatttgctgaggagagctttacttccaagtatgtggtcaattttggaataggtgtggtgtgatgctgaaaaaaatgtatattctgttgatttggggtggagagttctgtagatgtctattaggtccgcttggtgcagagctgagttcaaatcctgggtatccttgttaactttctgtctcattgatctgtctaatgttgacagtggggtgttaaagtctcccattattattgtgtgggagtctaagtctctttgtaggtcactcaggacttgctttatgaatctgggtgctcctgtattgggtgcatatatatttaggatagttagctcttcttgttgaattgatccctttaccattatgtaatggccttttttgtctcttacgatatttgttggtttaaagcctgttttatcagagactaggattgcaacacctgcctttttttgttttccattttcttggtagatcttcctccatccctttattttgagcttatgtgtgtctctgcacgtgagatgggtttcctgaatacagcacactgatgggtcttgactctttatccaatttgccagtctgtgtcttttaattggagcatttagcccatttacatttaaggttaatattgttatgtgtgaatttgatcctgtcgttatgatgttagctggttattttgctcattggttgatgcggtttcttcctagccttgatggtctttacaatttggcatgtttttgcagtggctggtactgactgttcctttccatgtttagcgcttccttcaggagctcttttagggcaggtctggtggtgacaaaatccctcagcatttgcttgtctgtaaaggattttatttctccttcacttatgaagcttagtttggctggatatgaaattctgggttgaaaattcttttctttaagaatgttgaatattggcccccactgtcttctggcttctagagtttctgccaagagatcagccgttagtctgatgggcttccctttgtgggtaacccgacctttctctctggctgcccttaacattttttccttcatttcaactttggtgaatctgacaattatgtgtcttggagttgctcttcttgaggagtatctttgtggcattctctgtatttcctgaatttgaatgttggcctgccttgctaggttgcagaagttctcctgggtaatatcctgaagagtgttttccagcttggttccattctccccatcactttcaggtacactaatcaaacgtagatttaatcttttcacatagttccatatttcttggaggctttgtttgtttctttttactctctttcctctaaacttctcttctcacttcatttcattaatttgatcttcattcacttatatactttcttccacttcatcaaatcggctactgaaggtattgcatgcatcatgtagttctcatgccatggttttcagctctatcaggtcatttaaggtcttctgtacattgttttctctacttagccattcgtctaatcttttttcaaggtttttagcttccttgtgatgggtttgaacatcccctttagctcagagatgtttgttattactgaccttctgaagcctgcttctgtcaacttgtcaaagtcattctccatccagctttgttccattgctggtgaggagctgcgatcctttggaggagaagaggtgctctggtttatagaattttcagcttttctgctctggtttctccccatctttgtggttttatctacctttggtctttgataatggtgacctagagatggggttttggtgtggatgtcctttttgttgatgttgatgctgttcctttctgtttgttagttttccttcgaacagtcaggttcctcagctgcaggtctgttggagtttgccggaggtccactccagaccctgtttgcctgggtatcaccagcggaggctgcagaatagcaaatattgcacaacagcaaatattgctgcctgatccttcctctggaagcttcgtctcaaaggggtgcctggctgtatgaggtgtcagttggcccctactgggaggtgtctcccagttaggctagatgggggttagggacccacttgagaaggcagcctgtccattcacagagctcaaacactatgctaggagagccactgctctcttcagtgctgtcagatggggatgtttaagtctgcagaaatttctgctgccttttattcagctatgccctgcccctacagatggagtctacagaggcaggcaggcctcattgagctgcggtgggctcctcccagttcgagcttccagaccactttgtttacctactgaagcctcagaaatggtgaacacccctcccccacccagtctgccgccttgcagttccatctcagactgctgtgctagcagtgagcgaggctccatgggcgtgggacccactgagccaggcacaggatataatctcctggtgtgccatttgctaagaccattggaaaagcacagtattaaggtgggagtgtcccaattttcccagtacagtctgtcacgggttccctcatctaggaaaggtaaatcccctaaccccttgtgcttcccggtgacgcaatgccccaccctgcttcagctagccctccatgggctgcatccactgtccaaccagcccaatgagatgaacaaggtacctcagttggaaatgcagaaatcacccatcttctgtgtggatcaggctgggagctgcagaccggagttgctcctattcggccatcttggaatggcaatctatgtttgctttttacatttgaaaaaactggtgtcacgtacctaggtattaatcattgtggtatcctcttgccgatttacctctttatcattaactagtgaccctccttgtcttttgttgttacagtctgtgattttagtctattttatctaatatgagaatagctactctggcacttttttggtttccagcttcatgaaatatccttttccatttccctgttttcatttccctttcggtgtctctatagatgaagttgatttctttaaggcaccataagttgggtcttatttctttatccatttgaccatttagagaatttagaacactgtcagtgttattattcataagtaaaaacttaagagtgggtgtagtggtgtacatctgtatttcctgcactttgagagactgaggcgagctgatctcctggggtcaggagtttgagaccggcctggtcaacatgatgaaaccctgtctctactaaaaatacaaaaattagccaagcatgctggcatgtgcctgtaatccaatttacttgggaggctgaggcaggagaagcttgaacctgggagacaaatgttgcagtgagctgagatcacacagagaagtcatctccactctcctcatcagaacctcttgttcacagcatttgtgagcacaaatcaatgatggttattctttcctactaattagggatattttattacacagcaatagcctccagcaaagggaaccatcatacatgattcctacaagttgacagggctggaattatcactgaaaaactaaggtggctatacttgattcccaatgtccaatttttcatgaatagagaaatttatcctttttccccccagccagaaaccaagttttgctcttacgcccaggctggaatcaagtggcacaatctcagctcactgcaacctctgccccccagcttcaagaaattcaccttttgaacaaggagatattaaggatacactatgtgtatgctaccggtggttgcaggagactcagaaaagagagaaacagtcactggcctcgtgcaactgatattctcgggaggagagaaaggcaatcaagaaagaaacatgctgtatttcagacagctgtaagtcctccacaagaaaagaaagcaggtgaggaacataggaaatgtgtcaaccataaggttcccgctaattctataagttggtcagggatatcctccaagaataagcagcatctgagcaatcacctgaagggaggaaggaaggaagactgtgagtggtggcttacacctgtaatcccagcactttgggaggccaaggagggcagattgcctgagctcaggagttcacgaccactcagagcaacctgttgatacccaatctctactaaaaacacacaaaaaaattacccgggtgtggtggcacgcacctgtagtcccagcttccatgcccagctgatttctctctctccatatatatatatatatacacatatattgtttttgcagagatagggtctcactgtgtcacccagtcatcaagcaattctcttatactgttttggaaaagcatgggaattacaggtgtgaaataccctgctggtcctgaaaaatgtgatatttgggattctctgcctggcttgttttacccaaaataatgacctccagttccttccaggttgctgcaaaagacatgattttcactgttttataactgaatagtattcctgtatgtatacataccacattttctttatttattcttctgttgattgacatgtagggtgattccatgtctttgctactgtaaataatgctgcagcaaatatttgtgtgcattttgatctattcctttgagtaggtacccagtactgcaactgcaggactgagtagttgttatattttttgttctttcagaaatctccatagtgtttgccataaaatctgcactaatttacattcccaacaacaatgcataagatttccccttttctccacattctcactaacatttgttatgtttttgtctttttcataatacccattctgactggagtaagatatctcattgtggtggttgttgatatttttgagacggggtctcactctgttgccagactggagtgcagtggtgtgatcgtggcttgctgcaacctccacctcccgggttcaagcaattctcctgcctcagcctcccgagtagctgggactacaggcgcgtgccaacaggcctggctcattttttgtatttttagtaaagacagggtttcaccatgttggccaggatgatcacagtctcttgagctcatcatacacctgcctcagcctcccaaagtgttggaattacagtcatgaggcagcgcacccaacctcaatgtggttttaatgaccatttctctgacgattcatggtgtggagaatttctttgaaataccttttggccatttatatgtgctcttttaaaaactgactcctgtccaggtgcggttgagcatgcctgtaaccccagaacttcgggaggctgaggccaatggatcacttgaggcaaagaggcagaaatcagcctggccaacaaggcaaaaccccatctttactaaaaatacaaaaaatcagccacgggctgtgactcgtgcctgtggtgcaagttactcaggaggttaaggcacaggaattgcttgaacccggtaggcacaggtcacagtgagccaagatcatggcactgcactacagcatgggtaatagagaaagacctgtctcataaaaacaaatgaataaataaataagataaaaaataaaaaagtctctttatgtcctttgccgactttttaatgggattctttggagttttctgttgtagttgagatctttgtttactctcggtattagtcttttgtcaaaggaaaagtttacaaataatttcttccgttctgcagtttgtctgctcactctgttgagaggattatttctttggctgtgcagcagctttttgtttcagtaaagcttttgaatttatataattaaaattttcagtttggtttaaatttgcactggtcgatttttggttttgttgcctgtacttttgaagtcatactcttgaactctttactagacaataaccagaagagttttctctagttttcttctcacatttttattatttcagtacatatatttaagtctataattcatcttcaattgatttttgtagaaatagtgagaaataggagtccaggtttattcttctgcaaatgacaattcaattgttccagcaccaattattgaaaagggtgtgctttcctcaacgtatattcttatcagctttgtcaaagatcagttggctataaatgtgtggctttctttctgggctctctagtctgttacatcaatctgtgtgtctatctgtatactactaccatgctgtattggtgatgatggctttgtaatataatttgaagtcaagaaatgtgatgctcccagctttgtttatttgcttcagaaaggctgagtcaacagctgcagagatgaagctgcccctcctcgcagggctccttcccggaaaaagatcatggctcccactgaccatataaccatggctggaactcctgaaattcccaaagggaggccctacccagtgaggggggatgaatgaaggtcctacttaaggaatctgtctggccacaatcaggcacagcagctgtgctgccttgtgggggaccagaccacctggattccctggagcctgcaggctagaatgtctgagtccatggaaacacagaaatggaggccgccctcacctccccagaaaactgtagtctcaggcagtctccagccgattgccactggttggctgctattccaagccagtgggtcttaacttgagaggtgctgtggaagtggggcccacggaatgaggctgcttggctccctggattcagccccttttctaagggaatgtacagatggaactcccgccttgcccagctttccaagtatataaaactcctgagtctctgtgagtgtctgagcgagtgctctggcaacattcgacacggctctgtgtatctgacccaagacccttatggcatgagctaatgggaggatcttctgatccatgcgtggcaaagatgcatgggagaaacatggtttgtgggtaggggttgtgcattcactactgcttctcttggctgtaggtgaaggtttctttggctctgtgctgatactgggtgcaccatcacccaccccctttgtttcttctcctgggtcaagtcatttgcctaatcagtcccaatgtaggaacctggatacttcagttcaaggtgctgaattcaccgtgcttttcattcaggggaagacagctgcttctcattgggcatcttggcctgcccacttcacgtcactttttgtaaaatccacaccactccaggaatatccattacttaacttcgcctgaaataaacagaaggctcattacacttatcatgggctcacttacttcgcctataatgaaggtgccatggaaatgctagtggatgacgtggtccattttcttagggatgagatagaaaaatggtgtatggctttttaatttaattaaaatttttagtttggtttaaatttacattggtctctttttggttttgttgcctgtacttttgaagtcttactcgtgaactctttactggacaatgaccagaagagttttccctaagtttcttctgatattttgaccatttcagtacatacatttcagtctataattcactttaaattgatttttgtaaacatggtaagaaataggagttcagatttattcttccgcatatgataatgcaactgtcccagtaccaattattgaaaagggtgtgctttccctagtgtatattcttgtcagctttgtcaaagatcagttgcctatgaatgtgtggctttcattttggattctctcgtctgttacatcaatctgtgtgtccacatttatacctgtaccatgctgtattggtgactatggctgtgtaatatattttagagttaggaaatgtgatgctcccagctttgttcatttgcttcagctgaaaaggttgagtccacaattacaaagatggcagccgcccatccccggaggacctccaacccagaaagagatcaggcttcccaccaaccctataaccctggctggagttcctgaaattccaacagggaggaccttcccagtgaggagggatgaatcaaggtcaaatttaaagaaacagtctggccactatcaggcacagcagcagtgctgccttgtgggggacccctcctgctccagaccagctgccctccctggagcccgaaggctagattgtctgagtctacggaaacagagacggtggccgccccaaccacccagaactcggtagtctcaggcacttggcttgctatcttgccactgcttggctggtattccaagcccgtgggacttgagaagtgctgtgatgatggggaccacaggatgaggctgtctggctccctgtgatatggctgtgatgagtggaggaacaccagggctcatgtctcacacagaattggagaaaatgacacaaacacatgtacagtggttttatggcgtgcagtttaataggcaagaacgaaggaagagctccccatactgagacagagggaggggggctccaaagccaaaagaggaaacccggagtgctgtggataccaatgagttatatgaagaaactggagggggcggtgtctgatttgcatagggttcaggcgattggttcgaccaggcatgtcatttatgtggcccacggaaaaactggccctcccacctagcctttgaatatgcacgtgccggacaccctgatttcctacactcatggggatatatgggggtggccatatcgccaggcacaggtggggacaagggccagaagagggcgggaatcgctatgtttgggtggacccagtttctaatggccggcatctgcagatcaaggttaccggagaactctaaaagccggggctttcctgctagacaagactcatttctggagctgctttaaaaagaaacaaaacttcccaaggaccccttttcctccctgtctgcccaaaataatttcttaacaactcgtataacacctgaattcagcccccttactgggggaatgtaccaacggaactcccacctttcctggtttctcaaggctagattgtgtaaacctcctgggtctcggtctgtgtctgagcagctgctctgccaacactccacacagccctgtgtactaggcccaaggccgccgtgactcagcccatgggaggatctcctgatttcttggttgcaaagatccatgggagaaaaatggtttctggggcggggtcacacactcatggcttctcttggctgtgcaagaaggttcctttggctctgttccaatatagcgtggttcatcacccacccctgttttctttgttctcctgagtcaagttgtttgcctagtcagtcccaatgtgagaacctgaatatttcagttcacgtgcttatcgtgaaattcactgagactttaattcagtggaaggcagcctcttctaattggccatcttggcccgccccctccacgtcacctcccataaaatggccacgctctccagggacgatgccattatatatctttacgtgaaaccgacagaacacttattacactttttgtgagctcatttacttcacttataatgaacatggccatggaaatgctagtggagaaagtggtcgattttctgatggatgtgataaaaaaatggtttgccgaccaattaatgacatatgtctcaaaactagtaacgagacccttaatcgctgggttgaagtttctaatcaagaagatgctcatctatgtattcaacaaagcagcttcccttgcttctgaaatgcttccaaacaacatctcatatttcctgaagaagataatgcctggacaagcagcacaagtcattcaggtttactttcagctcataaatccagcaggatattcgcacaattgttgggaaaccttatcagttcatgagtcgtgcatgtttcctttaatttcaggaggaagagggtaatctggaagagtttcctgacctactctgctgctgtgattaaacaaccaccaggaaattttgatgacactgttctcctgagctcctccctttcctcggggaagaaaagcattgaaactacaaaaataaagtgttatttggctggagtgaggtctcatgtctgcttatgcggtggctcgctgctcagaacagggtgagtctctgagttgtacgctgaggaggggaggctgtcaatctagaaaaaacccattgcatgggacacctccatggggtctggggggctgaggatgaggagctggactggatctagggaaggaggaggtttcagagggtgaaattctggcagtaaatcctgggggtgtttgaaaacttcctccctcagaaggagaagactcagggaggaataaggacaaaccatgggtcccttgaggggcatttactaacttaagaggactttatcgggaagcagagtgacaatggcctccttgaggactgaggcccctggataaatgaggcccagatccagatccagtccatgggagatgagaccttcaagggacatatttttgttgggacagaggaaaagtgcagctctgcagctgcagaggaagccttggcagtgtgaaagcgaccttggagggggccctgtgcgttctgaatgcttctgaggtccatcccctgtccccgcctctttttctggattttttgggctccatggtctccgccatcttctgagcgctccacgctgccaccttcagttttctcttctgggctccaaatactccaaaatctttcatatctgtgcccctacccctgtttttagcatgtgttgggactccaggtccctgaaggtttctggcctgaaatccacctccccagcggtgtggattctgctctagagaccccgcacttggcaaggttcccaggcccctgggggacaaccgagtggtatgtgcacttcagggctccacactcggcaaggtctttcaagcccttggggttccctcctcagttttcttcacatgtctgggatgtagtcactctataaatgccgggatgtgatccccaccccagtgattttttttagttccatgagtgttgctatctgaatagtcatcctgagagtgatgggaccttttgaatttgcagcaagttttagattagtgtgagtggcctgagatcgcaaaactggggctagcattggatgtgaggttaggctggtggaaaaatttgcccagaacctgaggagtgtgggctcactgcaggtggttaggatcagcacagaattgcaaggatgtatagctttggggtaaagaataacatggttcagaagtacatgtattagtcttttcatgcattgctataaagaattacctgagactgggtaattaattataaaaactcaggtttaattggctcatggttccacaggctgtacaaaaaggatgatgctggccatcagctcaacttctggggaggcgtcagaaaacttagagtcatggcaaaaagcacaagggaatcaggctcatcctccatggccagagctggagctagtggtaggagaggtgctgcacacttttgaacaatcagatctttttagaactctatcaccagacagcacctagaggatggtgctaaattattcatgaaatatccacccatatgatccactcaattctcaccggcccaaccaggaccacctccaccattggggattacaattacacatgagatgtgggtggggacacagatccaaactcgatcagtgggcatcttggactgggtctactatagaagaagaaccaggagctgactatcatccttaagactgcccatgatggccaggcagggtggctcatgcctgtaatcccagcactttgggaagccaaggtgggtgaatcccctgaggtcaggagtttgagaccagcctcgccaacatggtgaaaccctgcctctactaaaaacacaaaaaattagatgggtgttgtgccagacgcctgtaatcacagctactccagaggctgaggcatgagaattgcttgaacctgggaggcggaggtggcggtgagccccaatcgcactgctacactccagcatgggcaacaataccaaaacatcgtctcaaaaaaaaaaaaaaaaaaaaaaaaggctgcccatgaccactgccccagtgagagggacaccagcatggctaagatcaagtgctggacattcttcatgggtcagacattaaagcaggccacactgttacagagatgggctccattcatagcaacaaagtggtgagaagatgtgggaatggcagaggccagcactttgccatcaatgcaaggtgggcataaggagctggcaccagtgccagagtgcatcaggggaggactgctttgcaatatctagcacttacctcttagagtatgtttcattagggacaacagatataaatggcagacaagtgagtcccttcagtaacaggaaatagaaatcatcaagaggaacagaaacagatgtcagcagccctcatataaagtcatcatccttcatccagttaaaacctgagacagttctcacataagaaggtctaattcaaaaagagactgggttctcatgaggcaggttcatgcaaaaccaagggaagtatacaactttgggattctccagcttcccttggaaaagacctacaatcatttgcttaggtaactgagcactgaacaaaggtgagtattgttatctttcagaagctgttggccatgaaggtcttgctggcataaaacccatggttggaaacatcaccatgacccctgttagagtaatggcctaagggcaagggtcaggaaattgatgtattccttgccaacttctgcgagacgagtgttggtccactcatctctttcacggaattcaccagtctggtatcttcaaaatccagaaggatgatggcagatggcaggaaactaatgcaaacaccatcagttgtacctccactgtagcagcagtaatggatgttatctcttcattgtaatatccagggagggagaagatgacattattctcaatattctaaacaccctgtgtgtacagcctctgtgatattttttgtaatatccgtgtgggagagaattatattactcctaatatctcaggggttgtgccccctctgtgacaatgttcctaacacccaggaggggataggatgatatcacttttagcatcacagggggtgtacaccccactgtaatattgttcataatatccgggggggagagaatgatattactcccaatatcgcaaagactgtacaccaacctgtgatattatttgtaatatccataagaggaagaataatattactcccaatgtcacaggaagtgtacacccttctgtgatattgttcaaaagatccagttagggaggggatgatattactctcaatatcttaaacaccctgtaggtaagccctctgtgatattcctcataatatccagagggagaggatgatattactcccaatattgcatgaagtctacaccccacctgtgatattgttcctaatatccaggatgggagaggatgatattactcccaatgtcgcaggggatgtacaccttccctgtaatattgttcgtaatatctagaaaaggagaggataatattactttcaacatcgcagggggtgtacaccttccttgttatattgttgctaatatccagggaaaaagaagatgacattaccaccactattgcagaaggtgtacacccccccttgatatagttcctaatatccagaaaaggagaggagatattactccaaatattgcaagaggtgtacattcccctgtaatatttttcctaacattcaggaagaaagagagtgatattgcccttaatattgaagggagtgtgccccccccgtgatattgtttctaatatccaagaaatgaaaggatgatattactcccaatatcacaggggctgtacagccccctcccatgatattgttcccaacatcggggggggggtgaaatagtattattcccagtatcacaataggtgtacacacctgtcgtgatattgttcctaatacccatgggggaaaggacgatattattcttaatatctcagagggatgtacaccctccctgtgatattgttcctaatatccggggtgggagaggatgatattacccccaaaatctcaaagggtgtacacccctcttgtgatattgttcctaatatccagggtggagaggataatattattcccaatatccaggaaaggaaacgatgatgttactgtgaatattccagggggtgtcctcccctctgtgatattgttcctaatatccaggttggggagattatgatatttctccaaatatcacaaggggtgtacaccaaccctgtgttattgttcctaatatcgatggggggagaggacgatattactcccaatatcacagggggtgtacaccacctttatgatattgttcctaatatccatgaagaaagaggatgatattactttcaatatcgcaggggatgtacactccccctgtgatattgttagtaatacctaggagaagaaagtgtgatattactcccaatatcgcaggggatgtacacgcttcctgtgatattgttcctaatatttagggggaaaggggatgatattactcccaatatcgaatggtgtgtacacccccccgtgattctttttttttttttttttttttttttgagatggagtcttgctctgccgcccagactggcgtgcaatggcgcaatctcggctcactgcaacatttgcctcccaggttcgcacgattctcctgcctcagccttcggagtagctgggattataggcagctgtcaccataccaggctaatttttgtatttttagtagagttggggtttcaccatgttggtcaggctggtcttgaattcctgacctcaaataatccacccaccttggcctcccaaagtcctgggattacaggcataactttccctgtgatattcttcctaatattcaggaagaaagaggatgatattgctcccaatatcgcagagagtgtgcactcctcctgtgatatggttcttaatattcagaggaggagaggatgatattactttctatattgcagaaggtgtacacctccctcgtgatgtctttcctaatatccagtgggggagaggttattagtctcaaaatcacagaaggtgtaaacccccatttgatattgttcctaatattcaggggtggggagagaaaggtattactcctagtatttcagggcatgaacacccccaccgtgatatcattcctaatatccagaaggggaggcaatgatatttctcctaatatcacaaagggtgtacaccccttctgtgatattgtaaatattctgtgtgtacacccccctgtgttatagtctgtaatatccgggtgggggagagggtgatatttctccccatattgtaggggatgtacacccttctgtgatatggttcgttatatccagggaagaaaaaggtaatattgctgcccatattgtggagagtgtacacccccatgtaatatggttcgtaatatccaggagtggagagggtgatactgctccttacatcgaggaaggtgtacaccttattgttatatgattcgcaatatccaggggaggagagagtgatattgctccccatgtcgcagggggtgtaaaccctccgtgatatgattggtaatatccaggaaaggaaagggtgatatttctccccatatcgcgggggacgtacatcctcctgtgatatggttcgtaatatccaggaggaaagaggaaaatattgctcttcataacccgaggggtgtacaacccctgtgatatggttcgtaatacccagaagtgtacacccctctgtgatatggtttgtaatatccagggggttagagggtgatattgctccccatatcgcagtgggggtacacccccctggattggttcataatattcatggggggagaaatttacatttatcctcatatcagggggggtgtacaccccccgtgatatggttcgtaatatccaggggaagaaagggtgatattgctccttatatcgcggaaggatcaccctcccctgtgatatggttcataatacccagacgggaagagggtgatattgttcttcataaagcgaagggtgtacagccccctgtgatatggttcataatatgcaaaaggggagagggtgatattgctccccatatcacggagggtgtactcccttctttgatatggttcgtaatatccaggggtgtagatggtgatatagctcgccctattggggagggtgttcacccctctgtgatattgttcgtaatgtccagggaaagagaggatgatattactcccaatatcgcagaaggtttacaccactctgtgatattgttcataatatccagggaaggagaagacgatattactcccaatatggcagggggtgtagaactcctgtgatattgtttgtaatatccaggcaaggagaggatattactctcaatatcgcagaaggtttacacccctatgtgatactgttcatgatatccagggaaaaagaggatattactccctatatcacaaagggtgtacacccctttgtgatattttttgtaatatccaggggagagaggataatattactctcaatatcagaaggggtgaaaaccctcctgtgtcattgttcataatatttagggaaggagagagtgatattactccaaatatcacagtgggtgtacacccccctatgatattgttcctaatttccagaaggggagatatgatattattgccaatatcgcagaaggtgtacaccttactctgacattgtttgtaatatccagatggggaaatgatgatattactcctaatatcacagggggtgtacacccccttgttttattgtttgtaatattcaggggaagagacgattatattactcccaatatcgcagggtgtgtacaacactctatgatattgttcataatatccaggggaggagaggaagtgtacacccccccgtgatattgttcgtaatatccagaggtagagaggatgatattactcccaatattgcaggtggtgtacacctttctgtgatattgtcatgatattaagaaggggagaggatgatattactaacaatatcacaaaaactgtacactccctgtgatattgttcataatatccagaagaagggaggatgatattattctgaatctcgcagaagatatacaccaccctgtgatatggttcataatatcctaggggaaagaggatgacataactgtcaatatcgcagggggtgtacaattccctgtgatattgttcacaatattcagagggaaaaaggataatattactttcaatatcgcaggcggtgtacacattactgtgttattgtttataatatccggaatgagagaaaattttctcccaatatcacaggaggtgtacactcccctgtgatattgttcgtaatatccagggaggggagaggatactattactcccaacatctcagggagtgtaggccccccctttgatattgttcctaatattcggaagtggagaagatgatattacttccaaaatcgcagggggtgtacactccctctgtaatattgtttctaatattcatgagtggaaagaaagatattactcccagtattgcaggggacatacaccacactgtgatcttgttcacaatattcgggggggagaggatgatattactcccaatatcaaagtaggtgtacacccccttctgatattgatcgtaatatccagaattaaagatgataacgttactcccaatattgcagggggtgtacatttttgaatactgttcataatattaagagggggaggggatgatatctgtcccaatatcgcaaagtgtgtacacctcctgtgacattgtcccaaatatccagaggaaaaaaggatgttattactcttaatatctcagagagtgtacacctccctgtgatattgtttgtaacatccagaagaaagaggctgatattactcttaatatcgcagggggtgtacacccccgccccgggatattattcgtaatatccagggggaagtggaatgttcagaatgggagaggatgatattacttgcaatatcatagtgggtgtacaccccactgtgatattgtttgtaatatccgggaaaggagaaaatgacattcctccccatatggcaggggctgtacaccacctatcatattgttcaaaatatccagaaggggagaggatatgtctccaagtatcacagggggtgtacaccccgctgtaatattcttcctaatatccagggtgtgagaggataatagtactcccaatatcccagggcatgtacaccccccttgtgatgttgttcctaaaattcatggggagaaagaatattactcccaatatcacagggggtgtacatacactctgtaatattgttgccaatatgcagcaggagagaggatgatattactcccaatatcacaggggctgtacaccccgctgggatattgtttctaatatcaagggggaaaaaggatgatattactcccaatgtcgcagggtgtgtacttcctctttgtgacattgttcctaatatccaggagagaagagggtgacattccttccaaaactgaaaggggtgtacacaccctttgagatattgtctttaatatccagaacgaaacaggatgatataactcctaatactgcaggggggtacaccctctctgtgatactgtttctaatatccaggaggggaaagaaaaatattaatcccaatatcacagggggtgtacattccccctttaatattgttcctaatatccaggaagacacaggatgatactatttccagcagcacagggcatgtacacccctttgtgatattgttcctaatatccaggaaaagagaggatgatattactgtcaatattgcagggcgtatacactggttctgtgatattgtttctaatatccgggggtggagaaaatgatattactcccaatattccagcgggtgtacacccgttctatgatattgttcctaatatctgggggagagagaatgatattattgtcaatatcacaggggatgtacagattccctgtgatattgtttctaatattcacagggggagaagggtataatactcccgatatcgcagggggtgtacactccccctgtgaagttgttcctaatatccagggattgagagaatgatattactcccaatatcacaggcggtgtaaaccccctgtgtgatattgttcctaacatccagaggaaaagatgatgatattattttcaatatcacagggggtgtacgcatccctgtgatattgtttctaatatccaggggaggagaggatgatattattgttaatatcgcagggggtgtaccccaccctgtgatactgttcctaatatccggggtggaagaggataatattgctcccaatatcgcaaagggtgtacaaccttcctgagatattggtcctaatatccagggagggagaggatgatattactttcaatatcacagggagtttacacaacccctgcgatattgttcctaatatccagcggaagaagagttaggataatactattttcaaaattgctgggtctgtaccccctccccgtgatattgtttctaatatccaggaggggagaaagtaatatgactcccaatatcttagaagatgtacaccctccccataatattatttcttacatccagggggtagaggatgattttgctttcaatatcacagagggagtaaacctttccggtgatattgtttttaatatttaaaaagagagaagataaaattactcccaatacaaaggggatgtattgtgtactcccccctctgatattcttttttaatatccagatggagagaggatgatattactttcaatattgcatgggatgtataaatcccctgtgttattgttctgaatatacaggtggggagagtatgatattactccaaatatcgcagggggttctttccccctgtgatattgttcctaacattcagggagggagaggatgatattactcttaatattgcagggggtgtacccacgcctatgatattgttcctaatatccagagggggagaggatgatctaactcagaatatgacaaggggtgtacacacagcctgtgatatggttcctaatatacaggggagaaggggataatatttctcccaatatcgcagggggtgtacaaccccctgtgatactgttcctaatatacagaaggggacagcatgatattgttcctaatatcgcaggaggtgtacaacgccctgtgatattgttcctaatatccagggcgggagaggatgatattaccctcaatatcgcagggggtgtgcactttccctgttatattgttcctatgatccgggtggggggaaatgacattagtcccaatatcgcaggatgtgtgcaccgctcccccgtgatattgttcctaatatcaagggggagagaggaggatattactcccaatatcgcaagggatgtacatcctccatgcgatattgttcgtaatattcaggaggagagaggatgatattactcttaatatcgcagaaagtggacacccaccctgtgatgttcttcataatatccagggaagcagacgattatatgactttcaatatcgctgggagtgtacatcccttttgggatattgtttctaatatccaggaagggagaggattatattactctcagtattgcaggcagtgtacaccttttttgtgatattgttcctaatattcagaaagggaaaggatgatattactcccaatattgcaggtggtgtatatccccctctgatattgttccttatatcaaggaagagaaagaataatattactcccaatatcaaagacagtgtagacccctcctgtgatattgtatttaatatccatggggaaagaggatgatgttactcccaatatcgcagggggtttacacccacactgtgatattattcctaaaatccagtggaggagaaaataatattgctcccaatattgcagggtgtatacaggccctcccccgttatattgctcctaatatccagcggtggagaggatattactttcaatttgtgtagggagtgtatacccccctgtgatatttttctaatatcaaggatgggaaaggatgacattactcccaatatcgcaggaggtgtacacgccctgtgatattgttcctaatatctagggaaggagaggatgatattactttcaatattgcaggagctgtacaccctctgtggtattgttcttaatatttaggttgggagaaaatgatatgagtccaaatatcgcagaaggcatacacacttccaataacattgttcttaatatccgggggagagggtgatattactcccaaaatctctggggggtgtacacccccttctgatatttttcctaatatccagggaaggaaacgatgatattactataaatattccaaggagtgtacaccttcctaatatcctaatattgttcctaatatccaggggtgggagaggattatattactcccgatatcgcagtgggtgtacacccctcctgtgatattgtttctaatatccaagctaggagaaaatgatatcactctcaataccacagggggtgtacaccttccgcatcatattgttcctaatattcagagggaaagaagatgaagttactttcaatatcggaggggttgtacacaacccctgtgatattgctgctagtatccaggaagaaaggggattatgttactccccttatagcagggggtatacacctcccctgtaatattgttcctaatatcaaggctgggatatacgtggggggaaggatgatattactcccaatatcgcaggggttatacaaccttctgtgatattgctcctagtaaccagggcagaagaagatgatattactcctaatatcgcaggaggtgtacactcccccattatgttgttcccaatatgcagaaaaggagaggatgacattattgccagtatcgcagggtgtgtacaccacccctgtaatattgttccaaatatttagggggagagaggatgatattactcccaacatcgcagggggtgtacacacatcccctgtaatatagttcttaaaatctaggggaaaaggggatcttatttctctaaatattgcagagggtgtacactccccggtgatattgttcctaatagccgggagggagataattaaattactttcaatatctcagagagtgtacatcgcccttgcgatattgttcctaatatccagagcaaaagagaatgatattactcccaatatcttaggagtgtacatttaacctgtaatattgttcctaatatccagggggaagagaatagtattactgccaatatcgtaggggttgtacaccttttctgtgatattgttgcaaatatttagtagagggaaagaatattactcgcaatatcacagggaatgtatacttcccctgtgatattgttctgatatccagaaaaagagagggtaatattactcccaatattgcagggggtgtacaccccccttgtgatattgatcctaatataaaggaaggaagaggatattactcctcatatagaaggggttgtccaccccccttgtgatattattcctaatattcagggaagcagaggatgatattattttcaatatcacagagggtgtgcagtccacctgtgatattgttcttaatattcggggggagaggatgttattatgcctgatatcgcagtagaggtacacccctcaagtgatactgttcctaataaccaggggtgaagaggatgatattactcccaatatcgcaggtggtgtacacccccccatgatggtttctaatatacagagggggagaggaaaatattactcccaaaatcgctggaggtctacaccccccttgtgatattgttcctaatatccaggaaaggaaacgatgatattactgtgaatattccagggggtgtacacccgctttgtaatattgttcctcatatccagggtgtggagaggattatattactcccagtatcgcagggggtgcacgacgcccctgtgatattgtttttcatatccaggaggggagattattatcaatatggcaaggggtgaacaccccctgtgatattgtacttaatagttaggttggcagaaaatgatattagtctcgatatcgcagggggtgtgcactccgcctggtgatattgcttttaatatcaagggggagaaaatggcattactcccaatatcgcagggggtgtacaccgctcatgtgatattgttcctaatatccaggtggagagaacataatattactcccaatatcgcacaaggtgtacacccctcctgtgatatggttcctaatatccatgggaggagatgatgatattactcccaatatcacaggggatgtacaccacccttgtgatattgttcctaatatccagggaagaaaacgatgatattattgtgaatattacagggagtgtacacactccctgtgatattgtttttgatatacagggtgggagaggatgatattactcccaatatcacataaggtgtacaccccccgtgatattgttctaaatatttcggtggggagaaaatgatattagtctccatatcacagggggtgtgtgctcctcaggtgatattgtttttaatatcaagagggggaggagattatattactttcattatcacagggggtgtacacccctcctgtgatattgttccttatatccaggcgaggggaaaataatattactctcaatatcgcaggaggtgtacacaccccatgtgatattgttcctaatattaagggggaaagaagataatattactttcaatatcacagggtttgtactcctttcttgtgatatagtttttagtatccagggggaaagagcatgatattactcccattgtagcaaggggtgtacacacctcctgtgatattgttcctaatatccagaagtggtgaggatgatattactcccaatatcgcagggggtatacaccccacctatgatattatttctaatatccatgggaaaagagtatgatattacacccaatgtcgcagagggtgtgtatttttcctgtgatattgtttctaatattcaggcggggagaagatgatattactctcaatatagcagaaattgtacatccccgctgtgatattcttcataataatcagggaaaaagaggatgatattactaccaatattgcaggggggttacacttcccctatggtagtgttcctaatatccaggaagaaagaggatgatattaatcccattatccaggaagtgtacacccaccctgtcatgttgttcctaatatccagcagggaagaggatgatattacaccccccccccgtgatattctccttaatatccaggaggggagaggctgatattactggatatatagcaggggtgttcataccttctgtgatattgttcctaatatccagaaaaggagaggatgatattacttccaatatcgcagaaggtgtacacctccctgtgatattgatcctgacattcagaaggggagaggatgatattactcaaaataccgcagggcatgtgcattcccttgtgatattgttcctaatacccagaagggaacaggataatattactttcaatatcgcagggagtgcacacccccctttggtatggttcttaatatccagaaggaaagagggtgctattactttccatattgcaaggggtgtacaccccactgtggtatggttcataatatccaggcagggagagggtgctattactccccacagtgcggggcatgtacaccctgctgcggtacggttcctaatatccagggggagagaggatgctatgactccctatatcgcggggtgtgtacacccctgtgtggtatgttttgtattctccaggaacggagagggtgttgttacccctcatatcgctggaaatgtacactcccctgtggtatggttcgtaatatccaggggattgagggtactgttacccccatactccccatatcgtggggggagtgcacctccctgtggtatggttcgaaatatccagggtaagagagggtgctattattccccattttgcaggaggcgtacacccccctatggtatggttcgtaatatccggggtgaggggatgctatcaaaagaagagagaaagagaccccccatattgttctatattattttatactcagtacctgttttaagaagaaacaaggaagtgaaaccaaaagcaggcagcccggcgccaggcaccagacccaaaaccagacccgaaaccaggcctgggcctgcctgaccttagcctgatagttaaaattcaacccatgacctagcaaccaatgttatccatagattccagacattgtatggaaggacattgtgaaatttcttgttctgtgctgtttcactctgattaccggtgcctgcagcccctgtcacatacccactagattgctcaatcaatcatggccctttcatgtaagatctttagtgttgtgagcccttaaaaaggacagaaattgtgcactcaacaagctcggattttgagacgctagtctttcgatgcttccagctgattaaaagccacttccttcactacctcggtgtctgtggggttttgtccgcgactcctcctgctacactatgactccccatatcaaggggggtgtacacccccctgtggttcgtaatatccagcaggggaaaaggtgctattactccccatattgcagggagtgtacacccccttgtagtatggatcgtaaaatcaaggggggagggaaggtgtaattatccccatatctcagggggtgtacacccctttgtggtaaagtttgtaatatccagggatattacagggatattatccccaaattaatacttttataatttcttatgcctgcctttactgcaatctctgaacataaattgtgaagatttcatggacatttatcacttccccaatcaatacttttataatttcctatgcctgtctttactttaatctcttaatctcatcatctttgtgagctgaggatgtatgtcgcctcaggaccctgtgatgattgcattaactccacaaattgtttataaaacatgtgtatttgaacaatatgaaatctgggcaccctgaaaaagaacaggataagagcgatgttcagcgaacaagggagataagcataaggtctgactgcctgtggggctgggcagaacagagtcacatttttcttattgcagaaaatgagtaggagaaatatcactgggaagggaacgcattcctaggggaggcctatggacggccgctctgggggtgtatcccttatgtggttgaagataagggatgaaatacaccctggtcccctgcagtgccctcaggcttgctaggattagaaattccagcctggcgaattctagtcagaccagttctctgctcttgaaccccgtttcctgttaagatgtttatcaatgacaatgcgtgcacagcaggacatggaacctcaatagtaattccattttctccctggccttgtgaccttgctaggcccttctgcccttgtgatcttttattgccatttgaagcatgtgatctctgtgacccactccctattcgtatccccctccccttttgaagtccctaataaaaacttgctggttttgcagatcaggtggtcatcacagaacctgccgatatgtgatgtcaccccggaggctcagctgtaaaatttctctttcgtactctttcactttatttctcagaccaggtgacacttaaggaaaatagaaaagaacctactttgaaatattgggggctagttcccccaatagacattgttcctaatatccagaaaaaaagaagatgatattactcccaatatcacaggggttgtgaaccccacctgtgatatggttcctaatatccaggaagggagagaatgatattactctccatattgcagggggtgtgcacatccctgtgatattgttcctaatatccaggggaggagagggtgatattactcccaatattgcaagggttgtaaactccaccctgtaatattgctcctaatatttaggatttagggggggagaggataatattactcccaatatcgcaggggatgtatatgccctctttgatattgttcctaatatccagggggggagaggataatattactttccatatcacaaagagtgttcacccccctgtgatattgttcctaatatccaaaaaggaagaggatgatatcaatcccaatatcacaggaagtgtacaccccccccttttatattgtttctaatatccaggggaaatgagggtgatatttctctcaatatagcagaatgggtacactccccctgggatattattcctaatatccaggggaaaaaaagaggttgatattcttcccagtatagcagggaatgaatacaccctttgtgatattgcttctaatatcaaggggaaaagaggatgatatgactcccaatatcacaggggatgtaaacctgtggcgttgttgctaatatcaaggagggaagagtatgatattactcctaatgtcgccgaaggtgcacactttccctgtgatattgttcctaatatccaaaagggaagagaatgatattacccccagtattgcagggtgtacaccacccctgtgatattgctcctaatacccaggaaaaaagagaatgctattacccccaatatctaaggggacgtataccttccctgtgatattgtttctaatatccaagtggggagaggatggttttactctcaatattgcagggagtgtacactccccctgtgatactgtttctaatactcgggctgggagaaatagtattactcccaatatcgcagtgatattgtttccctgtgatattgtttctaatatctagtgggggagataattatattactaccccatacacaggggagggtgtacattcccctgtgatattgtttgtaatatccagggaaggagaggatgttactcccaatatcacaggggttgtacaccccttttttgatattgttcctaatatctggggggcagagaattatattactgtcaatatcacagagtgtgtacaccccctctgttatattactctttatattcagggcggtagaggatgatattactccctatatcacagggggtgttcacccctcctgtgatattgtttataatatctaaggggaaagaggatgatatcactctcaatatcaaaggaaatgtacacctttcctgtgatattgtttttattatataggggggcagaggatgatattaagaacaataccacaggggatgtacacccacgtattgatattgtccctaatatgtatggggaaagaggacagtgtaactcccgatatcgcagagtgtgtacacccccttgtgatattgtttctgatatacacggggagaaaagataatatttcttccaaaattgcagggggtgtacaaccccctgtgatattgtttttaatatccagtgggggagagaatattactcccaatattgcagggcgtgtacacaacccctgtgatattgttcctaatatccagagtaggggaggatgacattactttcaatatcgcaaggggtgtacattcccctgtgatattgctcctaatatccatgaggggagaggatgatattattcctaatatggcaggggctgtacaccttccctgtgatattgtttctaacatccagtgggggagaaaatgatattactccctatatcacagaaggtgtacactttccctgtgatattgttcctaatatccagaaggggagaggataatattactcccaatatcgcaggaagcttacaactcccctgtgatattgtttctaatatccagggaggtagggatgatattactcccaatatcgcaggggatgtacactcccccgtgacattgtttctaataaccagggggtgagaggatgatattacgcttaataccgaagggggtgtacacacccttgtgatattgtgcctaatagccagggggaagaaaattatattaattttaatatttatggggaaaaaggatgatattactcccaatatcacaggggctgtacaccgaccttttgatattgtttttaatatccagaagagaagaggataatattgctcccaatatcagaaaaggtgtaaaccccttctgtgatattggtcctaatatccagggagggagagaataatattactaccaatatcacagaaggtgcccacccccaaggtgatattgctcctaatatccaaagataatagggtgatgttactcccaatatcacaggaggtgttcacaccccttgtgatattgtttctaacgtacagggaagggagaggatgatattattcccaatatcacaggaggtgtatactcctctgtgatattgattttaatattcggggggaaaggatgatattactccctatatcgcagagggtgtacaccctctgtaatattgatcctaatatccagggcgggataggatgatattactcccaatatcgcagaaagtctacacaacccccagtaatattgtttttactatccagggggaagaggatgacattactcccaatttcacagagtgtgtacactcaccatttgatattgtttctaatatctagggggagagaatatattactcccaatatcacaggaattgtacaccacctctgtgacattcttgtgaatatccggggaaaaagagaataatattactcccaatattgcagagcgtgtacacccctccatgatatcgatactaatatttttttaaagaggatgatattactcccattgtcacaggatgtgtacaccccccttgtgaaattgttcataatattctggggggagagcataatattactccccatatcgaaaaaggtgtccaccctccttataatatggttcctaatatccaggatattacttaatccaggatacttgtaataccctaaatatacaattgcttgaacctccacctcccaggttcaagcaattcttctgcctcagcctcccgagtagctgggactacaggggcacaccaccacacccagctaatttttttttcttgtatttttagtagagatggggttttgccatattggccaggctggtctcaaactcctgaccttgtgatctgcccacctcagcctcccaaagtgctgggattataggcgtgacccaccgtgccaagccaggaagaggatgctctatagatttccccaataagagatggctttgcagggccattccaaaatatgtcaaagaaatacatttggggataaaatactttgatttcctttagggaatgttatctattatgtgatgctataccagagtcaggttggagtcggttatcttattgcaacaaagagtctgttccgtcactgttgggatctctattttttcctcttatttcttgagacagggtctcactctgtcacccagtctggagtgcagtggtgcgatcttcattcactgaaacctctgcctcctgtgttcaggtgattctcgtgcctcagccccttaagtaactaggattacaggtgtgcgccaccacacccagctaatttttgtattttcagtagagatggtattttgccctgttggccaggctggtcttgaactcctggcctcgtgtcatctgcccacctcgacctcccaaagtgctgggactgcaaatgtgagctattgtgcccagccaggatctctgttttaatgttagtgctggtcactttgcatgaactccaaagggaagaaatataatgaggtgtgtctgaccccctgccttctcatcgtgacctgaattagtttttcaggtttgcaggggatacccttggacaagaaggggctctattcggttggttggggggattagaattttactttttgtttacaatatttctcctgaaagagttaggggctcacaaggaatttccgcgtgagcaacttatgaggaaagccatctgggaagatatgtgtccttgtgtcactgggatattctcgtttaccccaatgatacggcaatgacgcagggttgtgaaattacagctatgtgtttggggaaaaaagaaagcaggattgtgtgactacgtttccaaacttcacttgcccttagccatagtgagttgggggcctggagattctgttttctttcacaatgatatagatacaattaaatgtatagaaagcaaaaaaataaaaaggtgagtaatgaggaacctctgattcctgagtggccatgtagttacccatggcacagagccacagttactgaaggtaaagtttgctggggaatttagaaatgaatccagctcttggaggagtcagtttactggatgcctaagaaaatgcaaacaaaataagaaaaaagggtaatattcaatcccatagttattgttacctgtcatagctaaagtaaaattaaaacagagtgctggcttcaatcttgatgctacactaagcttagatttcagtgaatgtgagtctcagccactagctcagagccacctcccaaagaccaaatcatgtagggacaatagaaagtacttctgagaattgtggttaccaagaacctagtaactgttggggaggagcaaaacaaagtacagaaaccagagggtacaatctgagtgagactgctatcagcttctggaggagcctttactaaaatgaatgatgagagtaactggatgatgagagtaactaatggatgatgagagtaagcaatgtctttggttttcttttttttttttttttttttttagcagacgtctcactcttgtcgcccaggctggagtgtaatggcatgatctcgcctcactgcaacctccacctcctgggttcaagcaattctcctgtctcagcctcccgagtagctgggactacaggcactcatcaccacacctggctaatttttgtatttttagtattttctggtgagggtccaggtttccggaaacaactcagagacatatgttaagatgttatctttagttttcacagggaaccaaatatgttacgactccaatttccttggctattgttttaagttaccattaccttctcgttgatcaagttgctcatttacttctcaagcctagctagatgcctggaatttcccttgaaggaagtcaagattttcctttatctccatactggctgatggtgatcgagtaagcccctaagaggggtccctgctccatctcgagatgctgctagattctacagtgcctaataaacagctctcgcctggccgacaaagagctgcttgctctctggatagcaattccaaagtgaacagacaacatcctgtttggaagactgccactctgttagaagaagcatcaggaaaacctttcttttgagctatttataactaacagcaattgaccaagtatacttttgtgagtgaaactgacctttctccctgtaagaattctccaaaatttggaaactatttgtgagtatttttacttatggcaatataattattggcacaagctcaatcagattcggttttctttcgtaacaggaaccattggagatactcattactctttgaaggcttacagtggaatgaattcaaatacgacttatttgaggaattgaagttgactttatggagctgataagaatcttcttggagaaaaaaagactgggtatattttcaatatgctttccttttaaggtccctcacctgtggaaagtaaagaatgtcactttctgacaggctcaggaacctcaagttatgtagggatctcaagaagatgggggaattcacccagttcatacaggtgaaattgctgttgcaaagattatgaatatgagagaagtccagcatggctgacttcatctcgtgtctggcctcaggctggctgcccttgctcactcttgggcataggccaagctagccatgggaggaatttagtttatagtttaactttgaagcacggatgataatagtctctccctaaaatgaaccccttccttgctcagggactgaaactacctttgtatgacaaatgaaagcccacaagattaagattatgagaggggcctgaattctgctaaaatgcaggtgtagctgactgataacaagtcattgtcccacagcttgcctttctataatctcttgcttctcaggagtcacatggccagaggtcctgagatttccagtcctgtgacccccacccagagatggacttagtgcatgaggaccattttccacacccctatgatttcatcctcaaacaatcagcagcaaccattccctagccccctgccttccaaattatccataaaaatcctagcctctgagttattagggagattgattaataatcccagtcctaccccttgggttgctctgatttaattaaaccttctctactgcaataccacggactcagtaaattggttttgtctgtgcaatgggcaagaagaacatgttgcatggttatacaggtactacaagcacagtctgatggcaaattattggttttgcttcctgcccttgatgtttctaaacatctagtccaaaattacttgtgaaaggtccagcaaagccaattttaaaagaggctatatggccaatcactattctttctacacattattgcaaataatcaggccacggctgggcacggtggctcatgcctgcaatcccagcactttgggaggctgaggcaggatcacctgaaatcaggagttcaagaccagcctaggcaacatgataaaaccctgtctctactaaaaatacaaaattagccaggcatggtggcatgcacctgtaatcccagctacttgggagactgagggaggagaatcacttgaacctgggaggcagagattgcagtgagctgagatcacaccactgcactccagcctgggcaatagagtgagactttgtctcaaataataataataataatcagaccaagtataatgaaattaaaatttattttgcaaataaattggtcctactacaatttatccttcatagaaatgtggaaactgaagataaaaaaaattaggtttcagaagaaaactatactacacctgttattagattctagccctaaacattgtttttgaggtttttattatttacctgcaatttggtctaaattctgaattatttcctgactacaagtatccaaggaataaatgggttttctttttctttatgatagttttagttggcttctaatgcaacaacaatttttattgtaatcctgtgtgcattctattcctactattcaaattattaatgttatagatctttcattgtagtacttctgaattaaccaaaatcacagtattctgaagatgattctacaaagcctgctgtttctacaaaggctgctgatgatttctacaaagcctgctgtagtgttgctgtggcctctgcttaaaaaagtagaaaacacattgatgcagcatgttcaccccaacctccctgcctaaaggctcagggaccatcttggaagaggaaggcgcgtgagattgtaagagccgaattagggggatggagtgtggagaataaggacacttcatcttggatgctcacctgccaaattgacttctgatgaaagccagctccagaaatgtgcctacagttactactttcacctaaaccctgcccttagtcaaatccttctcttcttctaagcaatcaacttcaattccttgtataacccacagtataaaagggcttttataccattctatcctattgcatgtaagccttgggtctgggaggtaacagtgtgggattccaccatctcatctccctgccacccaaacatgcctgctcttctttaagcaatattaaatgtttgtacttcagaaatttgatttgtcagcctcttcttcagactctcagcttctttggcctttgggagtaaatttgcataggcctgctcaaaacaggatgttctgggggtttgggggtgttgttttgttttgttttttgttttgtttagagacagggtctcactctgtcacccaggttggagtgcagtggtgcaatcatggcacactgcagcctcaaactcctaggctcaagcaatccccccaccttggcctcccaaagttctgggattacaagcataagccaccatgcccagccctggacttttctttaaagacatttacacagtgtaggaattactgtgggtgcactgctcaggtccccttctccaggatgctcattcctacctcatagatgattttcctgcagagatttgacctcagctgaagggcagtcacctggtccaggtggttgctattcacctccttcctgagaacagccaacagccagggacacgctagcacagagatataagagcgaccaaggtgaggccccttctgtgctgcggtgcatgctccagagcctccctgggatcagacttaagagggtctccagccagatctggtcttcgctgctttcctcgagctccccagcgcactcctgcaatgcatcttttttttttttttttttttttttgagacggagtttcactcttgttgcccaggctggaatgcaatggcgcaatctcagctcaccacaacctctgcctcgcgggttcaagtgattctccttcctcagcctcccaagtacctgggattacaggcatgcaccaccacgcccagctaattttgtatttttagtagaaacgggtttctccatgttggtcaggctggtttcgaactcctgacctcagttgatcctcctgcctcagccttccaaagtgctgggattacaggtgtgagccactgtgcctggcccaatgcacctcttgaatcacctcctcatgctttgcttttagagaacatgatccccaacatgtgattccagcaaagattctagaaagccaaccgtgacaatcacttctgggtttagatgacccccccccaccacaagatggcagtgagcacctcatcacagaggtgctgatggtctgcagcaccgcgccaggccagaacgtgccttttacagaagaaaataacccagtagctgactaggatggtgaggagggctggtgagcactgcggtagtgagagggacactagcatcactgagatgcaagtgatggtcatttttcataggtcaaagctcaaagcaggggacagttacagggcagggcttcatagcaccagtgtgatgaaagtatctgggagtggctaaggccagcactatgccatgggaagcaaggtgggcctgaggaggaggcagcagcgtcagcctgcaacaagtgggggctgccctgcagagacctaagagtcatgttatagagcacagtgtctgtaaggccaagaagtgtggacagccaagtgtgtcaattactagacatactcaagaggagcaggaagggcagggcatggtggctcatgcctgtaatcccagctacttgggagactgaggaaggagaatcgcttgaacccgggaggtgaaaattgcaatgagccgagatttcgccactgcactccagcctgtgtgatgggagcgggactccatctcaaaacaaaaaaagaaaaaggaaaaagaaaaaaagaaaaacctaggtatacttctcaagcaaataaaaataatcaaaaccaatatcatgcccgggcacaaatttcatatatataacagatttaaatatatgagggtgattatcctctcatatctccatttttttttgtttttccatttttttctttactaaaaaaagttaatgccaatgacacacaatttttttttttttttttttttttgagatggagtctcacttcttcgccctggctggagtgcaatggcgtgatctcgactcactgcaaagtctgcctcctgggttcaagcaattctcctgcctcagcctcccaagtagctgggaccacaggagtgagccaccacacccagctaatttttgtatttttaatagagacggggtttcaccatattggccaggctggtctcaaactcctgatctcaaataatctgcccgcctcggcctcccaagattctgggattataggcgttgagccactgcgccccgcctatgtatgattttttttttaattttattttcataagtttttggggaacaggtggtattttgttacatgagtaatttctttagttgtgatttgtgagattttggttcacccatcaactgagaagtatacactgaacccaatttgtggtcttttatccctcacccccttcccaccctttcccccggagtccctgaagtccattgtatcattcttatgcctttgcatcttcatagcttagctcttgaacccttactttctgtttgagggagaagacatatcatctacaagtagatactgtgtaaacattccattgcatgactatcccataacttatttattatttgtgtttggttatttgctgctatgtaacaaccccactcccaactaaatggtgtgacaattccatgattctgtggatcaaaaattctgaaaagtcaaacccaaggagttttgtctctgctccatgatgctaaagcctccgcaggggtgaggcgaatggctcagggtgactgaaaagctcagggttggaacagctggggatgaggcctctatgtataagatgattcttcactcacaggtctgaaactatggtggggacagccagaaggctcggctcagctgggacagtcacctgagccctacacatgacctctccaacatggtgatcctgaagcagttgggtttcttacacagcatcacacttttcttttttttttttttttttgagatgaaatattgctctatcacccaggctggagtgcagtggcacgatctcagctcactgcagcctccgcctaccaggttcaagcgattctcctgctccagcctcccaagttgctgggattgcaggcgcctgccaccaagcccagctaatttttgtatttttagtagagacggggtttcaccttgttggccaggctagtcttgacctcttgacctcaggcgatccgcctgcctcggcctcccaaagtgctgggattacaggcatgagccaccgcgcccggccaaagctcacacttcttatgattcagccttagatgtcacatcagttcattttccccacacttattagtgttagaagtcacaagcccacccatactcaggggactggcacacagaccccactctcaatggaaggggtgggacaccaccattcctgctgatgggcatttgggtaacttcctgtttgaagctattaagattgggctgctgtggccgggcgcagtggctcacgcctctaatcccagcactttgggaggccgaggcgggcggatcacgaagtcaggagatcgagaccatcctggctaacacggtgaaaccccgtctttactaaaaataccaaaaaaaaaaaaaattagctgggcatggtagcgggcgcctgtagtcccagctactcgggaggctgaggcaggagaacggcgtgaacccgggaggcggagcttgcagtgagccgagattgtgccactgcactccagcctaggcgacagagcaagactccgtctccaaaaaaaaaaaaaaagattgggctgctgtgactattctagtaggtgtctttggtgagcgcctacacgtgtttctctttttctctttagtatatgcccaggaggggaactgctggctcccagataccgtatgttcagggtcacacacacttccacagggttttccaaagcccttgtaccagcacgcactcccagcacctgtgtgactgctccagctgtcccacagtctcatcagttctattgctgatattttcattttagcttaagttatatttaataggaaaattaccgttgcctctgccccccgttcctgcctgtaggagtttctcgtagctgttgctacaggtggccacaaatctgtcacttaaacccacacaaattgatgtccttatggctttggagtcagaagtgtcaactgaaggtactagcagggctgtactgacctggtggcctcagggagcatctgtgctgcttctccaccttctagaggctgctgcatccctcgctccagccccttcctgacaccactcaccctcctacttctgttatcacatcctcaccttctctgtgttcagggctccctctgtctctctcttgcaagcacacttgggattccattgagggccacccacataacccaggagaatttctccacctcaatatccttaacaactgcagagcccttttgccataaaagttaccattcacgggttccagggattgtgacatgggtagctttaggagtgattattcctgcctgtctcccgctcaccagaacttggactttctctctcaacaggagccccctgtgtgggaatagcctgtctcaacgacgccctctataaggacctgcttcctcaaaggacctcatagtcgggtcctgcccctcagtgtccagtctgccttggctggaggggctgcaggggtgtgttggcgccacctggtggagacagggcatcacagcaggtgggagcccagtagaagcacaaccaaaacatgggtaatgtttaaaattttctggctaagcgctgtggctcacgcctgtaattccagcactttgggaggccgaggtgggtggatcacatgaggacgggagtttgagaccagcctggccaacatggtgaaacatcccctctactaaaaaatacagaaaaattagctggacatgtggcgcgctcctgtaatcccagctactcgagaggctgagacacgagaatcgcttcaaccccggaggggttgccgagatcgcgccactgcactccaggctgggcgatagagcgagactctgtctcaaaaaaaaaaaaagaagaggggaggcgaggggaggggaggggaaaagggggaatttgtttggagctgagacatccatcttctcctgacctcagatatttgcactcctggttatgaagccttcacacttggactgaatacaccaccagctttcccgatttccagcgtgcaaatggcagatcgtgagacttctcagcttccataattacatgagccaatttatatatataaattgggtcctccagaaaaacagaataaattatatatataattatacgcataacttaattaaattatacgtataacttagctatatatataatttattctgtttttctgaagaaccctactgacacaaatgttgagcatcttttcatgtgcttattggcttaataacttgtacatcttctttggggaaatgtctattcaagttctttgcccattttgtaactgaactattaatatttgtctttacattgttgagttgtaaaagttccttatatattctagatactagagccttatcagatatatttctgcaactattttctcctaatatataggttgtgtttttattttctttttctttttttttttattgagacagtctcactctgtcacccaggctggagtgcagtggcatgatcttggctcactgcagactcgacctgccaggctcaagcaattctcccacttcagcctcctgagtagctgaggttataggcacttgccatcgcacccagctaatttttgtattttttagtagagccgaggtttcgccatgttgcctaggttggtcttgaactccctgcctcaaagcgatctgtcagcctcagtctccctaagtgctggaagtacaggtgtgagccacagtgcccggccatctattttcaatagtgttttttgatgtacacaggtttggaattttgataatgttcaattcatccatttttttttttttttttttggttctttctactggaccaccactcttgagccctctaatccaacctccacgcggcagccagagggagctctctaaatgtaattactctttccctgctccacctgctcaaaacagtgtcacatttgtgatttaaaacagtatttctcaaacctaatttgcaaacaaagcaggtggaactcttcttgtatgcacagcatctgatttggttggtctggcatgggtctgggagtgagcacacctaccaagcggctgctggggtaacttgcgttttccactgatgatttcagcaatgtttccggtcccacatgctcctccagaaccttgtactcccccatgaaaaggtggagtccatttccccttcctttatttatttttttgagacgaagtttcactcttgttgcccaggctggagcgcaatggcgtgatctcagctcaccgcaacctccgcctcctgggttcaagcaatgcttctacctcagcctcccgagtagctgggattacaggtatgtgccaccacgcccagctaattttgtatttttagtagagacggggtttctccatgtcggccaggctggtctcaaactcccgacctcaggtgatccgcccgcctcagcctcccaaagtgctgggattacaggcgggagccaccgcgcccggctatttccccttcctttgaacctgatcaggacttgacgatggcatcaacatggtgagagtgaccctgcatggcttatgaggctgggttacacaaggcgatgttgcttctgactggctccctctcaggatacatgcccttggaacccatcctctaagctccttgggagcccaacttagcccatgtggagacaagacagggagagaaacagaggcacccccagccctcagccagcatcaaccgccagacaggagagcaaatgcgccaacaatgattccagctgaagcctcagacagcgtggagcagagatgagggatccctgcagattgcagatgcgtgagcaaaatgcatgctgtcactgttttgaaacaacaatgtctgggggctgtttgttatgcagcaatagacagctgtaacaatgctgttactgctgtattccatgaatgactgcactttgagtagcagggggctagatcactagataagccccatggcttctgtgtatgctatttttctacttttatatccttttcattcactttttttttttttttttttgagacagagtctcactctgttgcccaggtgggagtgcagtggtgcaatcttggcggactgcaacctccacttcccgggttcaagcaattattgtgcctcagcctcctgagtagctgcgactatagatgcacccccatgcctggctagtttccgtatttttagtagagacggggttttgccatgttggccaggctgatctcagactcctgacctcaggtgatccacccaccttggcctcccaaagtgctgggattacaggcgtgaaccactgcacccagcctcattcactttctttacttggctcatttttccttgttgcctcaattctcctctaagatcactttcctgacatttcagcctgggcctgttgccttctctgggtcccctccgcctcctgtgcctcccccatctcagccttgatccctcagattatacttcctctgtccccaccctgaccatcttggctgtccctggatagggatgggtatcttctcccactggtctgggagatctggaaggacaggcctggaaaagacttggtcactgctggaaggagctcagttagtgtggtgctgaggacagtacgggtgaggctggccccttcacccaaactcccactctcttccatagatttcacctctgtggcccaggccataggattagggcaactccccttaaacatcgagtccatcctccaagctgtccttttttttttttttttttttttttttgagacagagtctcgctctgttgcccaggctggagtgcagtggcgcgatctcggctcactgcaagctccacctccagggttcactccattctcctgcctcagcctcccgagtagctgggactacaggagcctgccaccacacccggctaattttttgtatttttagttgagacggggtttcaccgtgttagtcaggatggtctcgatctcctgacctcgtgatccgcccgcctcggcctcccaaagtgctgggattacaggcgtgagccatcgcgcccggcctcatgctgttcttgaatagtgagcacctgttacaagtcgccccaccagcctctcacttgtacccccctcatctctttctccccaagagacagaggaccctggcacttgtgaagcatgacccagaccctggggccatggcatccaacatcctcattccccatgacccctactgtctagatgtagctgccaagagacccccagactccccgggcctctgtctagagtgccaagacagagagagaatgccctgccgcttgcatgctttgtggggtgtccttcccccttccctggctgctaggcgtgacttcaacgttctccccaacccccaaacagcagcactgacaccagctgcagacctggctcaggttagctaatgaggaccaggctggggatggagcctgaacccctaaaccccagtcctgtaccccaccctaatcctggggtctccactggacaaaacgaagcagcttggtttttcgttgttattgtttttgagatagagtatctctctgtctcccaggttggagtgcagtggcgtgatctcagctcactgcagcctccgcctcccgggttcaagtgattcttgtgccgcagcctccccagtagctgggattacaggcgcgtgccaccacacccagctaatttttgtatttttagtagagacagggtttcaccatgttggccaggctggtctgaaactcctgacctcaagtgatttcccagcctcggcctcccaaagtggaagcggcttatttttaaggagaaaactcccgtggaaaggaatcagcacctcctctgtcaacatttcacttctctgaaaagactctcacttccaacagaaagtgctttgtaacacaacaatgaggctgggcgaggtggctcatgcctgtaatcccagcactttgggaagctgaggcgagtggatcacgaggtcagaagttcgagaccagcctgaccaatatggtgaaaccccgtctctactaaaaatacaaaaattagttccgtgtggtggcgtgagcctgtaatcccagctactcaggaggctgaggcaggagaatggcttgaacccaggagatggaggttgcaatgagccgagatcacgccactgcactccagcctgggcaacagagtgagactccgtctcaaaaaaaaaaaaaaaagaatgagaacatatggacacagggaggggaacaatacacacaaacaaaatttagaaacaggtgaaaataattttagtaatatttttactaatactgatatgctcaaaatattattatttcaataagtaatctaaaaattattgagatgtcttatgttcttttcatcatactaagcctttaatatttggtgtgtattttacactcacagcacatctcaatttgcagtccccatgtttcaagcactaaataaccatgtgtgtccggtggctaccatactggacagcgttgatctgaaatcgcatctgtatgcatcaccagcatatttgcagagatccccatctcagcagcacacctgaggctcatctgcgaaagcacctgcaacttctctacaacctcccacatcacctccaaacacatcctcatgtcatctgcaaacacacccatagctcacaggccaatgcctaaatatcattgcaggcaccttcagagaaagcacttactaaaggggtatacttgattccacatctgctttgacctgcaaatctcccttctcctttacatacatttgcatctcatttgtatgtcaatctaaatccactggcagagcctcagatcatcatctcaaagtcaggtggatgtggggctgggcaggcctccaggtgttcctcctcctgcttcctctggggctcttgatcctcctcctcttccttgctgctctcctcctcctcctccaatatggtgaccagttcctcccgcagcgcccccatctccagccccaggctgcacagctgtcccagcagctggacatccactcggcgcaggttcccctgccagtaggaaggggacgtcacagggatgccaccccagagagcaaggggtctctccaggacctgggtgagagcaggtcccaactcatgtcctggccacagcgcctgggcagggtcctcactgtgcccatggaccctaactgccttcctgcttctcagagtgtctcttgatctctaactcttctctttgtctctccatttcattgtccctgacttctctctctctgtctcctccctctcttatctatatctgtccctgtttccctttgtctctgtccccatttattttttgtctttccatgcccctgtctctctgtctttatgtgttgccatttctctgcccctgcctttggctctctttctctcgcttgccctctctctgccctccccaactttctcaaattcagtctgtctctccatctctgttcctgctctccgtctctgcttcccacctctgtccctctcttttgggatctccctgtccccacctctgttcccgtccctcactctatgtctgtctctcggtgtctgtacatgcctctcatgtctctgcttctatctctcagattctgtttttcgatctctggccttctctatttttgttcatttccattcattctcatttcctctctttctctttcccttccaaacccctcactcaccagctcctccctgatccacagcagactatcgcaggcacctccagtgtctgcccctgcagtcctgagggtctgaccagggatttccactggggagacctccctcagggcctgggggggtgggcccagccccggaggcaccagtccagcctgattcagctgcctccacagttccatcgtctctgagctatggctgcaaggagcaggaagtagcaaggtccagggtggcctggtcccctggggagctgtgtgcgtggtggagagtaaagggcagagggagtgggatgggggttcctgggaaaggtatcccaaagtccactcttcagagagaatcagctggccttgtgcttttctttttccttctgaagtctaacctcaactctgctcacagggttcaaacatagcctcttgcagaggtctaactccacccttccctgcctgtctcaggcctgacccctcaggggcgctcagtgtctgtagatgcctggcaccctctgtccttccacctgccccccaccaccacttctccagcctctcctcagcctccatttgacctctggcttgcccatagcttggtccttgcttgtcctcttggcacgggtcatcctagggctttcccaccagtgtgcctttgggggcaggaatggctcccaggggcaccaagacagcaatcccttagctggagtgcctgtgtccaggctgctggcctagggccaagcagccaattctgctgaccctggacttgcctatgggtatattatccctgttgagggtgagggcttctgctgtggaaaagtctgggaagcactgcaggcctctctcggccttggacccttccttcagacccaaggtgcatatatatacatatatataatggtagatcacgaggtcaggagatcaagaccatcctggccacatggtgaaaccccgtctctagtaaaacacaaaaaattagccgggcatgctgccgcgtgcctgtagtcccagctactcgggaggctgaggcaggagaatggtgtgaacccaggaggtggaggttgcagtaagccaagatcacgccactgcattccagcctggcgacagagcaagactccatcttaaaataaacaaatgaacaatatatatatatatgtattttgttttttgagacagagtctcgctctgtcatccaggctggactgcagtggtgcaatcttggctcactgcaacctccgcctcccgggttcaagcgattcccctgcctcagcctcctgaacagctggggttacaggtgcacgccaccacacctggcgaatttttgtatgtttagtggagacggggtttcaccatgttagccaggctggtctcaaacccctgacctcaggtgatctgcccacctcggcctcccaaagtgctgggattacaggcgtgagccaacgcgcccagccccaagtcccttttaccatagaaagtaacatagtcacagtgcccagggattcacaggtatggggagagggttcgttattcagctgccacacccaccttcctaaacctgctgcccttccagtttcctcacgtgcacagccacgcccgtctgcttttagtttctcaatctgttggcttaaccttcaaaacaggcccaggatttgagcacttctcaccattccctctgccccatccccattcatctcttgcctagactgctacagcagcctcttttactggtcccctgcatccacccttgccctctaaggcaagggtccccagtccctgggccaaggaccagtaccagcccctcgcctgctaggaactgggccgcacagcaagagatgagcagcgggtaagtgagcattaccgcctgagctccgcctcctgtcacatcagcagtggcattagattctcataggaggcaaaccctattgtgaactgtgcgtgcgggggatctaggttgcctgctccttatgagaatctaatgcctgatgatctcaggtggaacagtttcatcccaaaaccatccccaccccacccccgacccccagtctatggaaaaattgtcctccacgaaaccagtccctggtaacaaaacggttagggaccgctgctctaaggtacattctccacctggcagaaataatctttacaaaatgtaaatccgattttgacactcccttcttcccactgtgaatagaataaaaccctaccaggcctgcaccgtcagcccctgcccacctctcaacccagtctcctatctctgtctgcaagctggttcccacctcaaggcctctctgctctagaggctacctctccctgcagcgcttttcccctagatctttgaatggctctttccttatcattcacttctacttcaatgtcacctcttcagagaggcctttgctgatggccctacacccagtcacttttttttatctgcttctcatcaaaattgccttgctgattcctttgtttcttattcatcctctcccacatccatcctctcccagcccagaatgttgacttcctgagagagggactgggtctgtcctgctcaccatggtaacctcggcatctagaacagtgcctgccatcacgtggtaggtgctcagtaaatattcttggaactaatgaatgaataattctatccacaagacttcacaatggctcttcatgctgcgatctagctttcaactccaaactggtcttgagatctcacctcagtctctaaccttgacatctaacctcttcacccactctcttacctgaccctaatttttaaaaatgacgtggtcagcttttcagccccctcattccctgtttttaggaggtagtgagtggaagctggaagaataagaaagcttggggagactgcaattgcagtcaggaaagaaaggtactctgccgggaagaacaccccatcttctcctagggaaagattgtggagtcctggggtttgttttgtttttcaattttttgttttaagagacagcgtctcgctctgtcacccaggctggagtgcagtggcgcaatcacagctcactgcaacttcgacctccccggctcaagtgatccccccgcctcagcctcgtgagtagctgggaccacaggcgtgcaccaccacgcccggctaacattttattttttgtggatataaggttgccctatttctttgtggagataaaggctcccctatgttgcccaggctggtctcgaactcctggcttcaagcgatgctttcgcctcggcctccacaaagtgctgggttcacaggtgcgtgagcccgacctgtgtctcgttttgaagctcagggagagggcgctgtgagcaatccctaaaccctttaagagtaaaaagtgcgtgcacctttaagaggacggttagaaaacgcggggcgtggccacaggagaataagttcgcgctgaaccaggagcgtgggataagaccggccccttccggttacgaaaccttagcaagatggcggctccctgggcgtccctgcgcctggtcgcccccatgtggaatgggcgtatcaggggcatccatcgcctgggtgcggcagtggccccagagggcaatcagaagaagaaaaggacaatactccagttcctgaccaactatttctacgatgtggaggctctgagggattacttgctccaaagggagatgtacaaggtgcatgagaaaaatcggtttcgagacaaggagtggatcaggccagataagtatggccatttctctcaggagttctggaatttctgtgaagtgcctgtcgaagctgtggatgccggtgactgtgacatcaactacgagggcctggataacctccgaacctccgcaggctggacatctcggacctccctgccgtgtccaaccctggcctcactcagatattggtggaggagatgctgcccaattgcgaggttgtgggagtcgactgggctgagggcctgaagtcagggccggaggagcagcctcgggacacagccagccctgtccctgcctagcctttagccctgtccccactcacgtggcttctcagcgggctgcatggaatgtctggtagctcaccacacttctggcttccatttgtcttcactcaacgtcagggtgggggagtggtgctggccaatcacaggagagagcgtgagttcccagtatttattcctggctgcccttggctaaaggtcacagctcctgtcaccctgtcaggcagccctttccatgcccctgttcaggcctggggaggtaaaggctcaggctgttagtagccgcagagagccacactcaccttgtcaggagactcttctcaaactgtccttatgtgagtgcactgccatttcttgcagggaccctgactgacacaggggctactactgacactttacagggatggttctcccccgtgcagggccgctgtgcccactgcaggacatgcagcatccttcgccccactccactcactaaaggccagcgcaccccaggccccatagtattgctggttatggatttattgactttatgttccaaattcagctttttcagttggctgttttttgaaaggggataagctttgtcagtagagggcaccgaacaggcattataggaggaaaggcgcctccttcgtggttcttgttggttgtgcttctgcctctggacgccgcagtgcatgtggcttccccagcacccagctcctgaagcaccaggcggtcagcagctgcccttggcaccctccagccctcagaagttgcgtaggagacacagcgcctccactgaggcacctctctgggaataacgttccccagcaccccaaatggatttccagtcaattcagaagcattttaccagtgaagccctcattattccagttcactgttaaagccagtaattctctatattaaactttccctgttcggtttatactccggagtataaaccgaacaggattatattatctgaagctccccttttgggcggaatgtg

SEQ ID NO: 735334 - DNA, 188183 bp, Homo sapiens
ctccaaggctgagggatgaggagacctgctgaggacccagggccttatctttccatcccactccataggtcccagtattgactgatgctgtcttcacctcctagcctcacttttaaccttctggcacccgcccaccactgtccagttcactattgaagccctgccgtccagtgctgcagagggaaaggatgttcttctactggcctgcaatatttcagaaactattcaagcctattattggcacaaggggaaaacggcagaagggagccctctcattgctggttatataacagacattcaagcaaatatcccaggggccgcatacagtggtcgagagacagtataccccaatggatccctgctgttccaaaacatcaccctggaggacgcaggatcctacaccctacgaaccataaatgccagttacgactctgaccaagcaactggccagctccacgtacaccgtgagtgattcccccatacctctgggtgctggcggtcagttctgcttcacacacatgagattgtcaggcctgggctgtgcctgcatccccctctgcattttgtcccgtgttgagatttgggcatttagtgcaggacacacacatggtaggtaaacttcaacagatcagaattcctttcctgcatccaggccctgcagacactgatggcgggggcgggggggcctcagcagggggaggtcagtctcagccaagcaccccatgccctccccatgaacctgaccctgagaaagaccctggagaactgggtcagggcctggcctgagggcgtcctgggaacctcacaaaagcccagcctcaggactcctgactccgtgtgaccccgggaagcctgtgtcagggctggggtgtggtctcctgggcagggcttactgggagcaaggatttaccagatgtctgcgggctgtggttcctgaagcttctcatcagtgagggctcagctcccagagtctcatctagacaaggacagagcctaccactttccctgggactcagcctggagagggcagggggacaggattactagggcattggccccctgaatgaggagcttaagagatgcccttgggcagtcagtggcccaggggtaggaacagaggggagaaaatgttcctggcagcttcttgtccaccggggatcatgcccaggggtgctctcccatggaggcaaataacagatgctgttgatgtgaacacctcctctgtgccaagcttcatgtcagatcctgtgaataatttaaagttcattcacagacaaagtggcaagcctcagaccattttccatttacatattgtatggaggggaaactgaggcacagagagatacagacaccggccacggtgggcagatcgcagctggcagagtcacatgagggctgtctgcagctgctgccacgtcctctccttcatccctggtgccttactaggtgtctgtggaccttagaacagccactggttcggatgttttcttcttaggtgtctacagctcggagggggagattctggtctggagagttatgagtaaatacagaattaatcagttttttcttaactaaatcacctgcctcaacaatcagtcagtgctggggaagttcaggcctcctcgctcaggtccacaccccgcatctctggacatgaaatggcttcgtgtgttttctgatgtgtgggtatcattccaacaggaggataaaggggaggactttgctttctctccccattcacaccctgcaccagccagggcccagtgtgagacacatactccgtagttctctcatgaaggagggagggaatgaatgaaggaatgatctataacctcttcagagacagagacctggatacaagatcctaggaggttctgggcccaacgtgagacacacactctgtagttctcttatgaaggagggagggattgaatgtaggaatgatctataacctcttcagagacagagatgtggatacaagatcctaggaggttctggccacacctgttttctgtccctctagagcctaagacccatgtctcattcatctggcccgtttctcctaaatctgcccctgggagctgagtctcatctgaccctggggctgcagggctgtgggaaggttttcaggggagggatcaggcttgcgggtagtcccacacgtttgccttacaccctggagctctacctggttctcactatgaatatcccataataatcccccctatcctttctggggagtagaaaaaaagtaaatatttaaaaatatgccagagcatctgttcttcttagcaagttcagatagttattagttagcaggaataaatcgttattttaccagagcctcacctgctgggggtttatgggagcctaactgactgaggggggtgggaaatatccaactccagccccctctagccatcatgtcccacctaaaggagagaaaaaactgagaggcacttgtgacattcacagcccagggcacagactctatccaggaccacagaacccctccctccccccactcaccaccgcatcactgaacgcctgctcacccaagttcctgttgcccagtacatcatgtcctggctttcaacaaaaactacaagacagactagaggcaaaaaaaaaaaaaaaaaaaatgcagttcgaaagacagaacaagcatcagaaccagatgcagatgtggcagggatgtggcagggatgttgaaattatcagaccaggaatttaaaacaactctggggccaggagcggtggctcatgcctgtaatcccagcatttgggaggccgaggcaggcagatcacctgaggtcaggagttcgataccagcctggccaacatggcaaaaccccgtctctactaaaaatacaaaaaattaggcaggcatggtggtgggtgcctgtaatcctagatactcggaaggctgaggcaggagaattgcttgaacctgtgaagcggaggttgcggtgagcctagattgtgccactgcactccagcctgggcaacagagcgagattccatctctaaaacaaacaaacaaaaaacaatactggctaatatgctaaaggctgcaatggaaagcatagacaatgtgcagaacagacggatgctgtgagcagagagatggacaggctaagaaagaataacaacagctactatatctatctatctatctatctatctatctatctatctatctatctatctatatatatgtatatatatgctagagatcaaactcactgtaacacctggatctcagagtggttgtgaggatgtttattaggagattaaagagattaaagcagagttatacacagggcgagagctcaactgatgctatcaactagtattcttatttttttgatgttgttattggcaataaaatcaggaacaatgcagtaaaaatttggttttatcatgtacgagttctgtgaccttccttgacttactgaggtactgtaagtctcagattctaactctgcagatggcggtgatgcccctctccctcaaggtgatgtgaggatgagatgagctgtaggtaggttggtgcccactgtgcctggcacatggaaggcccctgaaaatagtcaatgaacatcatccccgctcatcagcatggagttgacagtgagggctcgctctctgtgacaatcatggaatggaaaagaagaaacaagaggaagactgggcgcagtggctcatgcctgtaatcccagcactttgggaggccgaggcgggcagatcatctgaggtcaggagttcaagaccagcctggacaacatggcgaaatttcatctctactaaaaatataaaaattagcctggcatggtggcacaaacctgtaatcccagctacttgggaggctgaggcaagagaatcgcttgaacttgggagatggaggttgcagtgagccgagattgcgtcagtgcactccagtctgggtgacagagcaagactccatccaaaaaaaaaagaaaaagaaaaaagcaacagagggaagaggtgtgacatgagaggaagaagggatttaaaggtacaggagcagggcgaggtgcaagcacctgtgggagaatgtaggagttggtacatcccagtgtgtcaagtctgagacacagaaaatggtgcaaccgtggagagcaagggagtcagctatgaggacagcccaacagaccacactcaggctctggagcatttccttcctccctgactatgcccctgccctgcaatgccccttatggtttcccttggaacaaacttgggccttgtcccctttgccttcccctttctgcagaaaacaacgtcccaggccttcctgtgggggccgtcgctggcatcgtgactggggtcctggttggggtggctctggtggccgccctggtgtgttttctgcttctctccaggactggaaggtaccgcagcttttccccagcctcctcccacccctaggctgaccccagtcagggaggagggagaccccgccctgtattcagggccaggctttccgcatcctcccaaggaatccttccctctcattccatggctcctcccttgccagctgctgatcctaggctgcctcttcctttatgaatgtggcacagttaaggttgcacccctgagtgctgtcctagttccctaacacagcaaagccacagctgcctggagggaggaagggagggagggagggagggagataagacgggagtgctcagaacctggtaccttctgctgttcattgaatttacccacccagtgaggagggatttgcaggcttgagatccatggtgggggtcctgggcatggtcacgcagtggggagtggcaaagcctggacaggctgggtagggtcagcaccccatcgtgattgatgtccctgaggtgtgagatgggagaacctggacctcaggacctgctgtcctttatgtctcttgccaaggggtggagagagagaggacaaggccattgccccatttcagcatctccaggcctgaaaggagggtctggccatggcagggatactgagttctgggagaatatgatacatgctccttgcctccccatgcccccagctcccccagtgtcctgcacacacagccggccctgctttccctctggggccttgacccttcctctcaggcaaacgcaggtggtctgattccctccctgagtcctcagtccctttcctgggtccctgggtcaatgttctcctcacccggcatctgcctgggggggtccttcctctctggccaggacagacgtgactgcttaaggcctatcctcagctccccgtcctcggccgctcctaccacgaaactgatggagacaggaggccttcactccagtccttgaaaatggagtcccttccttgtcctttattctgcccctaaacctgtgatttctccctgcaccctcatgaataatcctgacctttcctagggccagcatccagcgtgacctcagggagcagccgcccccagcctccacccctggtgagtgtcccttcagcccaggtgtgggagcccctaggcctgccctacggtgtccactcctgccagtcaccccctgggggcctctgaccctttctttggggctgcaaggaggatgtcaggaaacatgacacaggggaccccgactgtcttgttcagactgatctgtgggctctgggtcgtgggtcacctcctcgacctcagctgctcaggtctcccctgggaagaggctccctctccctgattctctgggagctgaggacccctacactctcctgcaggaggggcccaggctctcctcccaccctgctgctcactcctgtctctgtccccaggccatggtccctctcacagatccaccttctcggtaagcctgttccctccccagcccttttctactggggtcccaacagtgcaggctcagggcagggggaccatcaaccccacagcacagcactgacccacctttccccagaacagtcaggtcaaagtgagtgcctccagccaggatccgggcctctctacagggccaggaccacccacgccatgtgctgacccctccccgggaccctctacacctgaggagaaccctggagtccagcaggtgcagaatggacactgggaccatcagtcagaggcccacattaacaagggtgcggggtgggcccagccaggacaggggtcagggtgttgtgtccacactgggaggctgagctcaggggcagagctggtcaatcctgaggggaaatgagtggaagtggaggcagggaagtaagtcctggccgatcagagacaggaaccttccaggctgggcttccgtgaccctccctccctgtcccctgacatctcctctctcccctgcccaggcccctctacccagccccagaacagccactcccatctatgaggtgagtgtgggccatggatgttctggtcccgcaggctccaggggacccaggatctgcccccaccagcacctggctgagctcagattcaggaaaatgcagtgaaaatgagaacaggtggtggtgagcagaggagggaggggcctgggaacagggaccccctgagcacagccaggttcagccccagagaagccctgggtgggcccagagcctgggagatgccagacactgttctgagaaggctacaggggttgaggcctcttctctgtttttacaggaattgctatactctgatgcaaacatttactgccagatcgaccacaaagcagatgtggtctcttaggttcctctgggagctgctcttgtgggttgatggagcgtccccaaagctcccagccctggggacggggaaggacatggagcctgagccagagaaccagctctgagtcctgaggagacacaggcctggggacagggagggatgggagtccctgctgaatatctggagaccctgacaggttgccctgggctctgggtgggccgggacaaaggcctctcatcaccacaggaagcgggggcttgcaaggaaagtgaatgggcctgtggcccacccggggtcaccaggaaaggatctgaataaagaggacccttcctctcattggctctttttctgctcacgggaacttagcagaaactcacctgaaactccgtgtccattctctcccgggtcacacagggaaaatatctccaccttgtctcaaccacagtctctcttccctgggaggcagaaataggggttgggagtcaggctggggtgggccctacacaggaaagggcaagattcacatgagccctgcccagccagccgagcgctcagctgtcctcacactaccccagggaccaaggccatgcacagccccagcctgggtccctctgtgaatgcatgtggggtctcaggagcacagaagatggggccatctgatgtccacaaaaggtgagcaatgcgggagcaaccatgggtggtataggttgcggctgtggcccctacgcagcctccagtgtcctgacccctgctgccctcttcacccaggccctggaggcccagtctatcactgtcctccacaaatgaacttacctgtccccaaatccaggatcctgtgtgcttatacctggccactaggttctcctctgtcccagtggctactgctcaggacatctttatccctggtggggcacagagaggggctgtcagagcaaccaagattaatacagacgcataattcagtccttgagcactacccaggactctggcccctcattgctcatcagttcccactttaccccctggcatggatctcactgagcaagccaactctttacacaggagcatccaggtcagaggtgcaggactcccccatctaaagctcatgcaggctcccatggcgatgggacaacctgtctgctcctctccctggcccacagccctatctcgcctgcagctcctccacacacctgggacagcagttctcagcccttccctgagggcccctggaagggtgatgatctcatataggttcacttgaaccaggtgccaccttcccacaagtgagctggtgcctgcactaaagcacagagccacagttcccaagagtgttctgccactgccacaggtcccaagagtgttctgccactgccacaggttgttcgtcctgagatgagaggtaagaaaacaacccgcaatgggttgttttatatcgggatttgcatcaggatttagctctaaatgacccctgatcccacctgcacacagcgtcagatgagacaaggtgaggcctctttagttttctgttgaggctgtgacaaattaccacaagcttagtgacatagaaacctgaaccaaagtgcccacatggctgtgttctttctagaggctccagggaagagtgcatttcctctccttttccacctcctagaggcctcctgcaaccttggctgtgtcctctttctccatcttcaaagccagcagcacagcatcttgaaactattctgtgccctgcttccatccccacatctccacctcctcccacctccctctctcacttaaaaggaaggagccttgtggttattttggacgcacctgggataaaccacaacaacctccccatctcatgatccttcctttaatctgtaaagtgtcctttaccacgtgacatgtccacagatctggggatgaggatgtacacatctttgagaggcccttgttctgtccatcactcctctcaaggccatcttctcatcatcgttcactacaaactacacatgggcacctggatgggttcatcatgactgtggcgtcagttcctgcattaacatccccagcaccctccagatcctgagagagggagacggagggctctccatgcccctagtacctctccaccttcttcttggtgacatgcttagttgctaagaataacagaaagcggaggtgactgaaagatcacaactcaccggcccttcaatagttcgtggacatcagcaccacggacagtgactcagtgaggctaatttccaggtggcagcagggagcatgcagataggagggaactgcaggaaaagctgcccattctattctatatgagaaagagtgtaagaaagaggaagctattacagggataatgctattcttctctaatccataaattgcgaaacctttgcatgtctggatatcatggtttttagcacatctgctgccactccctgcagggctgattgctgcatccaggatgtggtctcttggggggctcacagcctgctttggcctcatggtgagtctccctgcccctgacactcaggccactgtctctgcctacaacatggtgggaaccttccatgattaacgtctgattctctgtgcctgacctttgaagcacatccatcactcagcctggagcatccgctgagctcagcatcctgctcctccatccccagctgagcccttgaggagatgcttgagaggatctcctgggctcctctgtgagctcctccaggctgagccttgtgcttggtgtcagaggcctttgccatctgcttgttctttccataggcaaataatcctcctcagggacaagtggggcctgaagatctgtctgaatatctatctatctatctatctatctatctatctatctatctatctatcatctatctatatgtatgtatatatgagaatgctttattaggcaaaactgcatactatgaacatgctttaaaatgcaacaggatgagatgtgaagacataaagaacaagtgtgtagtgacacatggctatcagaacacactgaagaatccacaccgcggccgagagcagtggctcacgcctgtagtcccagcacttttggaggctgaggcaggcagatcacttgaggacaggtgttcgagaccagcctgaccaacatggtgaaaccccatctctactaaaaatacaaaaaatttagccgggcctggtggctcatgcctgtagtcctggctgttcgggaggctgaggcaggagaattgcctgaacctgggagacacaagttgcagtgagctgagatcgcaccactgcactccagcctgggagatagagtgaggctccatctaaaaacaaaacaaaacaaaaagaatccacactgcttccccgcttcactttacccagaaaaggaatgttctaggccacttcctcttcagcacacatccccagggaactaaaataggttcacagtcacccccatcttcctcattcccatcacctcttacccacagaggcatctctggtcctacagatccagccctgccttcaagaggcacaggtccaacccatccagtgtccctgctagtcacacacagcactcagggtacaatggagggcttctgtgctttggatgggaacaaaccccacctcacattcccacacctgagaagccaccagggtcctctctgtcctgtcctcacactcaatgtctgtcctgggtcacccttgtcatctctcctggaaataggcatggctcctgacaggtaggattgaggctttgtcttttcaggagtccctcccactctgagcacatgaaactgctcagctccatgcaaccctctctcaccaggggccttgttctctgggtccctgaatacctgggtccatgccatgtacattttaagaaaaatgacagtgactctcaccctgacatcctcacccaaggcacgtgtctgacaagaatcaccaggtgagatacctgtggctccacacacctgaggcttcactgcgcaggggtgtcctcatccctctcctcccacccctagggacagtaagcaccacaggctgccttggaccaccagctccccctcccagacacagcctcagatctatactgacatgctacatggagaggctctgatgaacagcaggtattaggaaatcccaccgaaccaggtgccacttgcggccccactcctcctcatatctgtgactgggacagacacacataacacacctctgttcaccgcccagcccccaaggtcaatcacagtctgcttctcccctagatccactgctccccatgtcttccgtcctcagctgcatcctgggtggcctccttgctgttcttgtaccccagaggcaggttccaacctttgtgatgttgcctgcaatgcccaaactttcccttccccttccccttcccttttcccctcccccttcccctccccttcccctccccacccctatcccttcgtcttcccttgtcttcccttcccttccctataaagccaaacatacccatccacctaccttgtggtcaaagtcatcagcctcctgctccactcagtgttctctgaccctgcatatggaggtggtggcccctcctagaacacccaccactcactgtcagccttgcgtggtaatcacagattttgcaggggttacctgtgttcaggtgtgtcacctgtggaaccagaactcttggaaggactggcagagggagctgcttaggatatctcagggctcctggcatctggtctaccacagggctattaacaacagcacttagggacaaggtggaggatggacggttaagagggtaaatatggatgatgtgtgggcaaagaataggacacaggaacacatgcagtactcaaataattatgccaagaaaggtgaggacatggagatggacattcccatatacttctgatgggactgcagtttagtccctacagcaacattgacctcatcatgtttaacgcgcacacgctctgaccactatcctacttctgaaggcctccctgtgctgtgagctctgagaaggccaagcttgcctgttctgtctctgctaaagccagagaccagccaatagcccagcacagggtacttcataaatacatgttgaaggaatgagctccaggaacagtactccacatggtagagatgtgtgtatgaggatgttcactgcagaaggtcatgtcaatgtgacaagtgacgagcagcctcaaatccagcaacaggggtgtgggtaaaagatcatagtgtagccatgcaatggaaccaatgaaaaaaccacaattagagcaaatccacatgtattaataaaggaggtgccctccatacatgctgcacctaacagaatgttgccaaataagaatgaaaaatgatgatatttgggctgtaaaaactagaagtcagctaaataagaatgcatcgaaagtatttgtgaatgcttacaattttataatgccttggcatccgttttggatggaagttggactttctcataccagaagcagggctcagtcacctttgaaatagtttccagttctccacctccttccagttcctcagtgtgattgatcagatatctgatttatacaactgcctcctggtgacctcctccctatgggacttccggatacagcccgtatgactgccccactgaccccacaccctgcctgctgcagtgaccacctctaattacctggatctcatgtctgcttgcattaaatccaccaattaaaactccctgaggacaatctgtttgaataatattctgtaccctaataaaggccttgacccatgggttccccctctgtcctccccatactgcccctgacctctgtgtgtgtgtgtgggtgtgggtgtatgtgtgtgtgtgtgtgtgtgtcctccagacagggcctgtatcccccaggacctgtaagtaataaatctttattttcatcttatgtctctcgcaatcattggcaagagctctgcatcttaaagatcgcaaatttaagaaattggtgtagtcggcacaatagagtacctcttctgtttagcacaagatatctcggagctgctgaggcttttaacatcctcgccggtgtggctgcctcactggtgaggccgttctgttcagtgcaattcagttgctccactgtgtgctgctgtgttgctgctgtagagtgctgccatgttgttctccccaaattgttaccgagtaggaacctgtaatgtgctcccaaggtggtctaccccatgagaagggggattctccatctagggcaagggctaggtgtgtttctggaatcctaatagggaaggcatccacagagggtgaactccactcctccttagagtgaggagtgacatttcccatttattttccccatggaggtgccatgtattgactttttctttcactgtcccaaggttgagccaaggtgagctatggagaccagggcaagataccatttctgttagcaaagcaaatgggtgacaacgtgtggagaagctgtggttctcctgatggatatagcagagtgccatttagtaaaatcttgtcaggaggctgcccctggttagaccggcagtgtctgtagtcactaaggtggatgcgaattttaggccctgggccatggataatccctgcagacacagccgtggcttcatgtgatggggcaatcccgggctagtggctcccttgtttctgcatttcttgctgtggttgcacaatcaacacctcaggggttgattgggtcaccttggaaagagaaacagctgcctaggaggctggtgcacatggaggccaccctcaattttattctgctaacaagttgtaagattaaaacaacagggggctttgggtaccatcaggaacttgtcaagtaaacatccaaagacagaaagaagaaaaagaaaaagacattaaccgtctagaaatacaagccattttaaagattttgcttaaaagatgcgcttgggctgggagcggtggctcacacctgtaatcccagcactttgggaggccaaggtgggtggatcgactgaggtcaggagttcaagaccagcctgaccaacatggtgaaacctcgcctctactaaaaatacaaaaaattagcagggcatggtggcaggtgcctgtaatcccagctacttgggtggagaatcgcttgaacccgggaggcagagacggcagtgagccaagatcgcaccactgtactccagtctgggcgacagagtgagacttcatctcaaaaaaaaaaaaaaaaaaaaaaaaaagacgggcttgtttcgtcgttgtggagtcatcccagagagaggctactccctagagtcactgaccacctttcctcctccatcttttcctcttatcattctagagacagaaaacaagaatctcagctttaggtggctaacctcaccccccaagaaaagaaactaccactttgattgactacaaatccaagaaaaataaaagagaaactttaaaaagtactgagcaaaccacaggtctagcaaacataatgctagccctaggttacttattcatttacaacaaacccctagatataggaggaaaaaataaaaggtaattaaatatatacacatacaatattttaatataaatatataataaatagttaaattatgtatgtataatatgtaactaaatcaaagtaaaatttcatactttgattctattggaaattcaaaattcatttattaacttatatattaaggaatttatgtaaaaaaagatttttaaaagggcaccaatttgcttttgtgtctctacaacataggatctaatttaactttacatttgctaaatacactaattgacaaatattcatggatttaatcaatactggggctcaaattgtagccacacgtgggaatcccataaatttaaacactctgtccctattatcttgagaagaaaactaaatataaaattgaaaaaaacaggtatgtctcaatttacctgtaactttgcctaaatttcccggagtcatatacccattgctgtaaaacattctctattggacataggtgctctgagacaataaataaaatagaagtgtttttggtacttagacattggcttgacaaaatgggatcccatgaaacctcagttaagatagtgaatacggcccaatgtgagttgaaatggggcctttaaggattaaaacttattacatgaaacctagtaagtaatggggtgattatccatactgcttctccatttcatagcccaattttgacagttgtcaaatctggaaaaaacaaacaaacaaacaaaaaaacccctgggaatctgttgcctcacagagacacaaagtagacatcaaaattgtatatctcagttccagttccaaaatggtggcatagaagcaagctggctttactccttcacacagaaaaccaaaaacaaatatacagcaccaaaattattaccagatatattccagaactcaaatatgaaaatgaaacagttttcagagccacagagaagtgaaaaaaactcccgacagatgacaaaagaatcagatttccccatctgtaatgtccctccctgccccattctgcctggtaccaggtgtgtggaaaattttaccccaactcatggtttctacactgggaaatgtaagatcaatgcgggcaaccagtttctgcacaatcctgggttccctgtccctgccttaacccacaagaagcattgtgagtgcccgaagggagaaatttccctgaggacagtcaaagagtggggaggcaggactaccatctccttccctggaaactctgctgtgtaactcagccaagggagacatgaaatcagactggtgtttcagcagctccatgttgtagtaggtttgtttcacaggtatcctgggcatggacatctagccagctttcccacactgccaggatatcccctttgggacctccctcagttaggaagggcacactctgatcatttactagggccaaggtaaaccctaaaggtaacttagagatgaaaaggaggtagtgacctagcagtaaagaactctaagaaaatctatccaataaaaatcaaaacaagccagacaaagactaaaataaataatgaatccttcaatgtaaagacctggacttacatccacaagaaacagtaagcaggtaaccatgatctccccacatggacaaagtgaggaacaagtgactgatcctgatgagatggtgatgtgtgagctctctaatcaagaattcaaaactgcagttttaaggaaactcaatgatcttcaagaaaacatggaaaagcagttcagaaatttatcagagaaatttaacgaagggattgaaataatttaaagaaaacaaacaggaatcttggaattgagaaatatatttgctgaacaggaaaatttattagagtctctcaacagcagaatggatcagaggaaagaatcaacccaaataagactcccccaaggcataaaataatcgaattctcaaaagtcaagggcaaagagaagattttaaaacagaaagagaaaagaagcaaatggcataaagaagctccaattctgtggcaacagattttcagtggaaatcatacagaccaggagggagtgacatgacattctcaaaatgctgaaaaaatattgacatttgagaatactttatccagtgaagttatccttcaatataaaggagagagaaagtttcctagacaaacaaaagctgagataattcacaccatcagactagtcttcctgtaaatactaaagggtaaatactaaatacttcaatgtgaaagtaaaaaaaaaaacactaacatgcaaaacaaccacaacaacaataacaacatttgaaggtataaaatccactggtgaaattaagtacgtagacaaacccagaatactcaaatagtaattgtggaaagtaatccaatcataactctagcatgagtctcaaaatataaatctatcaaaaacaataatacattttaggaggccaaggttggcagattccttgaggtcaagagttcaagaccagcctggtcaaaatggtgaaaccccatctctaccaaaaaatacaaaaatttgcagggtatggtagcacatgcctgtcgtttcagctatttgggaggctgaggcaggagaattgcttgaacccaggaggtggaggttgcagtgagctgagattgcactactgcactccagcctgggtgacagagggagactctgtcttaaaaaaaaatagctacctgtttggagaaaggtaatataaaatatgtaaatagagacaaagtcaaaatttgcaaaggatgaaattaaagagtagagtttttttggggggttttctgtttctattattttatttgtgatctaagataagttgttaccttttcttctcttgaagatactttgttatatctatgtttttggaagtcttatggtaactgcaacgcaaaaaatctatgatagatccactgaaaataaaaaacaatgacttaaaacatactaccagagacaatcaaccacaaggaagacagtaaaaaatgaagaaaggaagaggggagttacaaaacaaccagaaaacaggcaacaaagtggcagtagtaagttcttacttaaaaatattgaacactgaatataaatggactctattctccaattaaaaggcatagagtggctgaatgctgcctatatgctgcctacaagaaaccacttcatgtaaaaagatacaaatagactgaaagtgaagggggtggaaaaagatatttcatgcaagtggaaaccaaaagagagcaggagtagctatactgatatgagataaactacaaatcaaagactataaaaagagacaaagaaagtcactatgtaatgataaagcgctcagttcagcaagaggagatgccaattataaatatctatgcatccaacacttgagctcccaagtctcccaagtatttaaagcaaacaatagtggatctaaaaggagagatagactgaatacaatattaattaggggactttaacaccctgctctcagcaatggccagatctttcagacagaaaatcaacaaggaaacttcaaagttaaactacacactagatcaaataggcctaactggcatttacgggacatttcactaactatctaactgttacagaattcacattattttcatcagcacatagaacattcttcagaacagaccacatcttaagtcccaaaaccagtcagaataaattcaaaaaagtttatatcacatcaagcatttgttctgaccacaatggaataaaactacaataaatgaataactttctggacacatacaacctaccaagatggaagcatgaaaaggcagaaaaacccaacaaaccaacatgaaactgtaacaaaaggaaaacccaggaccgaatgacttcactgctgaattctaccaaacatttaataagaactaaaaccaattctactcaaaatgctttaaaaaattgaagaggatggaacactttcaaactcattctacaaggtcagcattatcctgataccaaaaccagacaaggacaggacaaaaacaaacaaacaaacaaacaaacaaacaaacaaaaaaacactacaggattgcttgaggccaggagtttgagatcagcctgggcaacatagtcagaaccaatctcttaaaaaaaaaaaaaaagaaaaaaattagccaggcatggtggcatgtgcctttagtcctagctactcgggaggctgaggtgagaggaccaattgagcccaggaggttgaggccgcagtgagccatgtttgtgtcactgtactccagcctggggaacagagcaagatgctctctcaaaaacaaaaagcaagctgggtgtggtggctcctgcctgtaatcacagcactttggaaggctgaggtgggagaactgcttaagcccaggagttcaagaccagtctggacaacatagggggactccatctctcaaaaacaaccaaccaaaacaaagccaaaaaagaacataggccaacatcactaacaaacatagatgtaaaagtcctcaataaaatattaacaaaccatgtttagaaacacatcaaaagagatcattcactatgattaagtgagattcatcccagggatgccagtatggctcaacatatgcaaatcaataaatgtgatccatcacattaaagagaaccaagaacaaaaaccatataatcactccagcaagtgcagaaaaggcatttaataaaagaatgggttgagggagtggagcccatagtcagagcagcagtggtctgggattttggaagtagaaagaagggcagcaccactggccaggaccaccagggaacacccccataggccctgggtgttgtgctccagggagggttccctctggagttattaatcttggtgtccactttgcccagctgcccctcacagggtcagggaggatgaagggaaagcttccttctaatgaaagttcagggactcacagttcctagagcctgtagggagaggaagatcttcgaggaagagcacctgggcattggggcgtttgagaggaagatctatgccaggtccaagtggacaacctgtggactctctctccagggacatacgggtatctgggaatctcctgtagcttaaagaggtaaagacctctccctttagcctgaggactggaggatgctggttcaggtgaatgagtcctgcaggggctggtacaggcctggagggtggtggtgtccagggccttgggttcacccttagcatgattcaggccgggcggtgtttcacatgagcaagagggcctgggttcattgcttcaggacaatggtgaaatctcatggtggaagaaatcttgtccttgccagtgcccagctttcatttggtcttggcccagagtgtcctccctagagaagactcttgtcccttcttcacactgcccttcagggatatgccagccttatgggataagatggggtggagactgtagatgtgggtgggaatctctccacagagtgctccttctctcagcggttgcaccttgtctcagggcttcagcttgaaatctgggatctccaagcccttccctccccagtcctggccaggaccacatgggcagatgcattgtgtgaagtgcatttcatttggggtgtcctctctgcatggcaccctcccgttgattctctttgcgcatgtcagagtgcaggcaccatccacacctcctgctggaggagggacggagctgttgactcctgagagctgatcatgtgttcccaccctcacacacaatcatggtccatcctctgagggacatgtgttgccaccactgtggagatggtgcaactgacagtaacaaacagtaaaatctggtactgaatgggaccttaagccaacaatgacaatgtcattccaaggtgtttcatttttattgattcaatgcaagtcacctgatttcattgactattcacaatagctcgataaagtaaatgcatcatcaccaccactttaaagaggaaaaaggtgcttgggcagtttgtgactactgtggtggctgctgcattgctctctggtaaagccaagtaggtggtgggtgcggcctctgggctgggatgatccaccctcctggtggtggcaggggagccaagctggagccatggcctgtgcagtggtagcagctgaactgaccgctgctgcaggatttgcaagctgttacattttgcgaagccatgaagcacataaaacctcaagtagaacaagtgtttcaaagtctaccaaaatctgccttcagagattattactacagaggtggatatgaacccaaaatgacaaaacgggaagcagcattaatactagataatgaatgaacactagtaatagtagggtaagccctactgccaataaagaaaaaaataagagatgctcattaacatgttatgctcttaaatcacgcagacaaaagagggtctccttatatagtagccacaatcaatgaagctaaagatttactgcaagatcaagctaaaaacagtaggtgtataatgaatttttaacttcatattagtttatgtatatgaatatcaagtttttataataaaatgcctccaaacaaagaatatttgatttagggtttaataacttctaagaggggactcagatgtttcctgtttcacagtcagtctgagagggtcatttttcctggagctgacctgggtggaggcctcacactgatactccccagcatcctctctcctgatggggtttatgctgagcatacagtggccctgggacagctccattctctccatgagtcacagacgctggtcatggaagatccactggataaggttccagagtcatctgtggggcaggtcaggatcacaacatccttttcttctgtgactctggtgttgctgactcagatggggtcggagccactgaccctgtggacaatcagtggaggtgctcaactgaaagtgggctgagggcacgtcttctcctccatccctgggtccttaaggtaactgtggaccccagaccaactgacacaggagctagaaagaaattatttaggaagttagtgagggtaagagcgtccttggcaaggtttcccctttaacaaaaagcagcccaagataattccttttctaacaaagagcagcctgaaaaattgagctacagatgtagatgagcaagatggaagcttgcacaggtgaattccagtaggtgtgccaatagaaaagggctgcctggaagccaggtatgttcaacatggagactccatcctcccttttctccattaccacatgtacagtaaaaaaccaggcaacatggcaccggccaggtagacaatccatctgcatgacaaaagatcagagtggggcagccagcaaatggcacagctggtctaaacaatctttcaccccctgtataaatcagacactgcctcctgaagctcatctataaaaccttctgcatttcactatggaagtggcaacccattttccccaggacccctctctctgtgcagagagctcttctctttctttcccctatgaaacttccactcttaacttcactctgggtgcctgcatcctagttttccatggccatgggacaatgaacctcgagtattaccccagatgaatgatgctgtttcacaatcactggttcagctcccttcttcttagggtttcacagctcggtggggagaataccacgcctcagtggtctggggagtgaggaacaaatgaagaattaatcagattttacttagaacgctatcacctgcctcaaccatcagatccatgttgggaatgtccaggcctcctctcttagatctatacccacttcactggacctgaaatcctgtgtttcccgatgtgttggtgtcactcctatgagaggataaaggagagaactttgctttctctccccactcacaccctgcacaagacagggcccaatatgagacacacactcgctcagtagttctctcatgaaggagggagggagtgacctcgagtgattctgccatctgtagtctgtgtaccctggccagtggctgtatcttcatatgcctcagtttcccctcagtaaaataggacacacaatgagaactaaaaataaaattctaattccccagtgaactgaaaggatggcctcttggccaagcggatcccagagttcctgatcatgacaggatgggaggttacacctcattacagcccctccctttggaagtttagaggtgacaactgactagcattaacgctaaaatcgagatcatgagactgacagaacagactctctgtggccataagataccaaattataaactcaacctaaggtcatgcaggcaagggctaagccacactttcctacatttaaagaataagctatgttctaacacagaattttctttctctctagcggctaaagtaacactagccttcgagataagcaatattgaaatgatcgcggctcatccaccaacactggctaactgacccctgttccaacagccacaactacacttcaattggacaggagactgatttcagtaactttctcctaataagagaccactgagcatggcctggttctgctggtatacagacacggtgcactgagtaccataatgcttgtttcatcttttgatgtataagacctaatttaatacatttaaatctgaattctccaccccaaagtgaacatggggtgcatgtagcatgcatgtttgttgatcacgcatgtgcgtgtacttcctttgtgagtatccatagctccacctataacctgttgaatatgtatacctggccaactcattcagcataaatctatcttccacattcccctcccttgaagtgcctgctattggtctctgctggaggctgcatcttctaccctggggaatggccagcctgcaggctgtaaccctgtgtaagaaataacctggttgggtgcagtggctcacacctgtaatcccagtggtttgggaggttgaagtggtagaatagtttgagctcaggagccagagactagcctgggcagcatagcaagatcctgtctcttaaaaaaattttagggaggagagtgaggatcagaaaaaatacctattggctattatgcttagtacttggatcatgaaataatctgtataccaaacccctgattacatatataacaaacctgcatgcgtatctttgaacctaagataaaagtttgttttaaaaactatctgggtgcagtggtgcatgcctatagttccagctactcgagactgaggtgtgaggagtgcttgagctcgggggattgaggctgcagtgaattatggtcccacctgtgagtagccacttcactcaaacctgggagacagagcaagaaccggtctctaaaaaaaaataaaaatagaaaaataaaatgaaaaatatatgaaataaagtctcctttccaaacgtacagatctccgatttttctgccaacaatgataaatggtcagtggcttgccatgttgtctgtgaattacttttaaaatattcacgatcacctgacctaaaggttggtaccaaggaaccgcctgaatacaccgtctctgattatttgcctccaacagagtgttccctgggcctgatctctggtggacaatgagctgctgggaacatcctctcttctctattcctcccctggggatgctgaccttcccttggagtctcctaagttccccagggcagtcggctaatgtcctagggagcttacctgtcttctccataccaagtctcatgtgaaggacgaggctttgcccttgcccagatgaggctctgggggctgagccctggctggctaccagctgcaagagccatggcccttggacagctggtaaatccttgttcccagtcagccctgcccaagatgcctcaacccagccccggcacaggcttcccagggtcacatggagtcaggatcctgggacaggggactggacaggggtttccagggctgagtttctgaacaggggcttcccaggggtcccctcactccaggatctgacatggtcctacaaggaacgtccatggggaggggacccaggagggggaactgacactgacctccccttactgagcctccccccaaccccatcagactgtccttcctctgtagcaagtgcctgcagggtctggatgcaggaaagaaattctgatctgtggaagtttgtctcccctgtgtgtgtcttgcactaaatgtccaaacccccaaatgggatgtaatgtagagggggacacaggcacagcccaggcctgaaaatcctgtgtgtgtgaagcagaactgacccccaacacccagagctcatgagacatcactgtgtacgtgaaactggccagttacttcttcattcacaagatctgtttttatgacttgtagggtgtaggatcctgtgtcattgttggtgacattctgtatcagcagacatgtattggggtatattgtctctcagcctctgtggcaggtcctggggtaattacttgagttcctagtacatatcctgtaattcccctttgtaccagttgtagccaagcctaaggcagattgtgggtgagtggaagaatctccttgccttctgcagcttcaacagtgacttgggcagtggtaggcaagttccagaaagttaaaagtgaggctaggagtggggagagagcatcagttaatactgggccctatgcattgaggtggaaagatggggccctaggtcctggacaggtctcttcatccctcagccttggagtgtgtgtgtgtgtgtgtgtgtgtgtgtgtgtgtgtgtgtgcgcgcgcgcgcgtgcgtgcgtgtcctactgggccaaggtcagcagcatgacctcccttccttcagtgcctctgaccttggcatttccctgtttggagtccttttccccaggggtctgcctggctccctccctactgccttcaggtcctgctcacattagggcatccttgggagaccccttccctgacacctctagagaccctgggtcttccctttctgacctttcgctgctgtgttccctccagggctcttgtcaatacttgacctcacattctagatacccttgcatgtctgtcttcctccctatgagagcatgagctctgtgagaacagggacttgtgtgatcttggttgcaccccagtgcctgggacaggctgcggactcctgtggatgagctcatgagtgttcccagggcccttcacaacgtgggatttattttccaatggctgaggttgttggctaagagctctgttggagttcaatcaggctggtgggaaaaatattagagatagttatagagatagacacaaatcttcttggaagaccaaaaagtttgcataactttggtaatagatctgactgaaggtggtccctttacctttagttaaacaaattaaagtagtaacaaaggaaggcagagtagtttgtctagccagcttgtttactcatgtgatcttaagactaaccattgatgtgccacaggtgcttaattgctttctacttgggaagtccacaatgtcaattaccctctaacggtgttgactcaagcctttgttaattaatcttactgaataaatatgagtctcactagctgatcaaggccatggtcacaactgtttataggactcagcagggagtctgtaagcggccctgacagactcagctggactggcaaagcaaaatatgtgtgtgtcagtgtacactattcacccgtcccccacagctggtgcccctatatgaggagtgctgccacagagctctgtttagtgtcccttgttttttttcttgagtattaccccaacttaaattgtgattattgtcatctgttttcaacattaactgctcagtgatgattcacttggaaaacattaacaatcgagattgtttcttcactaacaacctcagattatttagattttcctgttgtaatcccttcttcctgtttagtgtccaacagaagccctctgtccctctcaggtccccgttctctccaagaaaccccagccagtctctgtgctccctcctcccatccactcccagggagccctcccctcacctgtgagcagaagcgcctgccagggatgtgcactctgtgaggaggggctgagggaggccccatgggctctgctgtctgctttgtcctcctctgtggagaggagcttgggcttcagaaaataaggaggccagaaagtaaggaacaggctgagaaataatggggatgtgtcgaaaggtcacagatgccaacatctttgtcctatgcaatattatccataaaattacaggtttgagatatgcttaaattttcttctaacatgcattaaaataaacatataacttttaatagttatattaaattgtatttaatataaattaaatgctcttgtcagagctactgtgactgtcagctctgctgtccttcctctctctgtgctaagcctcctcccagggcagaagcacttcccagggccaggggtgggggcggggaaaggtaagtggcaatgaggatctgcacaggtagcctttccgcctcctcccctctcagtcctgcctccttgtcttcttttcctctttttctccaatctacatttcagttccttagaccacgctgtgagaagcaaggcttattgggacccccatcccttaacaggatgacctgtgctccccataagtgacctctgctgtgtctagggattggctctgtcagcacctcacagagagtccctggggcccccaaactcagtgttattttctctatgacacagaaacccctctgggtatgcaaggttttcctcatgttttctaatgtctgggaaggttggatttactcccagcagggaggtcacagagatgtccagggagtggggtcctagaaatggacaaatctagagctaaagcccaggtctacgattttcagttgtttttttctgcagtgctatgtgaccctaatttcctaggagtaactaaaatgcaaacctcagacatttgtagacattttatgatttttctctacagcttgtaccactgttattattatttgctttatgctttttcctaaataaatttactttacaaaacatccttgtcctagtagggtgcaggggctcacgtctgtgatctcagctgcttgagaggttgaggtgggtggattgcttgaggacgggaatttgagacaaaacatctttgtcctatgcaatattatccataaaattacaggtttgagatatgcttaaattttcttctaacatgtattaaaataaacatataacttttaatcatcatattaaattgtatttaatataaatttatatacaatacatttttatataataaattatatatataaatgtatatataatagtttttcttttttgagatggagtctggctctgtctcccaggctggagtgcagtggcacgatctcagctcactgcagcctccgccttctgggttcaaacgattctcctacctcagcctcccgagtagctgggattacaggcgcctgccgccacgcccagctaatttttgtacttttttagtagagatggggtttcgccatgttggccaggctggtctcaaacacctgacttcaggtgatatgccgcctcggcctcccaaagtgctgggattacaggcatgagccaccatgcctggcctatatattttatataattatataaagttttctataataaattttatataataatatataaaatggatatttatttaagataaagttattagttttatatatttacatatatttaggaataaatgtgttactgtgggagcccagtgcccaggcaggtagtcagtacatgatggttgtcattagggttaatactttggaattctggattttttcccaagagagtgtctacgctggaatattgggcttgtggctttctgctgatgtgcatgtgtgaagaagctacttccacttattaggacttgtgtatctgtctcgcagtttcactacctattttctcgtgatgttggtcaagtcgcctaacttttctgtgcctcatttacctaatttgtagaatatgggtaacagtacacaagtgtgagtgtgtatttcccaggactgaccactagagggcgtgaaggcaccggcacttactattacagcaatgggtgtagtagtgctcatggtcgtaaacatcattctcccatgaaaggaaccagggcttcctgggagaaataactgattccagggctggggccggaaagcacaagcggagcctggagcatctcgtgaggccagaaagtaaggagccggctgaaaaataatggagatctgtcgaaaggtcacagatgccaaccagaaggagctttgaatgaccaattttgagacaaaatgagcactataagaaataatgatagtaataaattccaacccataaatacccatgagttcctactaatataaataaataattgaatacataaatatataaggatgaagaaacagctttttcttacagcagaattccaattaatgaatgtagaaggaatgatcaaatagaaaatcactatttggctaacagcacagtcaattgtttgtaggcaagaattatcaatggactttaaatatgaatgggtaaaagtatgatgatgctacaactagtgagtaccaagggggaaaaaaaagtacgttgagaagaaacaggctacttccatattcccaaagtatcacttcaggagctacttattgattataatgggacaaatagtaacttacagtagagaaacctggcaacagagtctctccgaggtacaaaggctctcttcaggaaggaggtaaggggaaggaagaagaaaacactgtcctgcctcaattatttgctttccccattctcaagtgtacttcatagacattcaaagatatgtgttgatagtgtccacgatccacatggctctattatagtcatttattcacacatacattcagtgaggctttgagtgcctaatgtgtgcctgatatttgctagatggtggatgctgagaagatcaggtgtgctgctgtctctagggtgactgaatccacctgccccactttacagatgtggaaattaaagtgaaaaggatttataggattagttcactgtcacaaggtcactagccttaaagttacaggagtaaagcaagtttcctgacttgctagattttctgctgcaggtgctgacaatggtgagctccaataggagagaggacactcagagtgaagtgggagccctgaacaccctggattagccaagaggacatgccgggtccagctgtgaccgcacaaaggaccattggggatatttgtattctctttttcacttagagcttgaaatgaggaaaactaagtgcagaaaaccaagagtggaagatttttcacaaagcactggtaacatgcatcagaaaaccctgtgctgatgtctgtcacggtgtttctcactgaacggtaatagtctggctttgagtgtgttccctctacagcctggagttctgcgaggcagggaccaggtgtgattcatctttgtctctccagtgacagtacacagcaggctctgataaatatttcttacaaaataaaatggaataaaaagtagacatctgcacaggtgtgggatgactgagcagcagcagaagcaggaaaagtcagcgtccccagatcagctgatgtggtgttcggattctagataggggtgaggtgccaggatggggatgggggtcctgtggctctgctgccctgggggacacccctaggtttcacagtgcctgctgtggttgctgcactttgcttccccatgggaaagtgatcagagggtgtggggcttcaggtgaccccatgtgggaaatggccaagggaaggtggggtgggcggcacatggttttttttaaccaatatttgaaggtaggttgtatgaaaaggtgttaggcttatttcagcttatggggagtaggacagggattggtgagtgtgtatcaggtatattttggctcaggatggaaaagaactgtcacagtaacataaggtcttttgggaaattacatgtttactggcagagttcaggccagggctgggtgtctgaaaatacctgtcagggtcacttttatggttacaagggcagagcttggcttggaaccaggtttcttactaataccacatattaagtattataaaaactgtcctttgcaataggacattgctctatgatgcaggttgaggtccctctgtttaagtaattgtgggtggctgtgattctctcatctagtctgcgacttggacttcacctccatctgcagtccctctcctttgctgttgacactggtcagagttaagcgcatttactgacgatggtcacagggtggcagcactgcctctctggtattttctaaaacctcttcctggaactgagccagtctaagaggatgtcatgactaagaaaagggcactaatgaggtgaacagataattttttttttcttgtttctcctgtgaagtaacagagtggaggtgagcatggaataattgccttttagaaatggaagacaatggagagaagtgtttcgcaaaccttaatgtgttcacagatcccacacagatctttttattcaatacagattctgatttttctggtgaggcctgagattgtgcatgtctaaggagcttttggatgatgccattgctgctggttggcggaccacactttgagtagcaaggctcgaagatcatttagaggttaattctcactgcatctaatttatggatgaaaacaaaccaaggtccagagagagcatatacagcttgcctaacaaagccattccctaagtgcctgacttcttgcatttaaacccagggcttcagcctttgtccagttctcactccacacatcacacggtttgttcactgttgtgaacgacagttgtggcagcatctctttagtttaggaatccagagccccaatttcactaccctctttggtcttggctcatgctgtgacttcgaatagttttgcccttacttaaaatcttcagtggctcttttgtaatcacaagatcaagttcgaatatctctgtctagtgttcatggctttataacatatggtatctctttagtaaccttacctaacttccctgttttaaaattgtctcttgctgccatagccctccttgctccttcctgctccctaacaaactgtgttcacttctctctcagtggtagtgatgatggcatggcctctgatgttagactcatgtaacttctaatcccagatccaccaccaacattggcaagttgattcatctttctgaggataagcatcctcctctgaaataaacttagatggcggttgagaggggtaaataaaataacacacaaacccactctcatccctgagaccctcttcaaaactagcatataaaaatagctatttgaagaggttcagtgaaattcaaggtaacacagagaaggaattcagaatcctatcagataaatttaatagactgaaataatttttaaaaatcaggcagaaattctgtagctgaaaaattcaattgacaaaccgaagaatgcactaaatctttcaacagcagaattgatcaagcagaagaaagaatttgtgagcttgaagagataatatatgaaaactcagagtcagagagacaaaagaaaaaagaattaaaagaataatgcatgcctacaaggtttgattattaagctactcaaagagatacaagagaagggtgaaaaccaacataaagaaatgtaaaaaacaatcagaatataaatgaaaaattttctaaaatgctagctagtttttttttgagacaggctcttactctcatcacccatgctggagtgaagtggcacagtcatggctcactgcaggctcaacttcctgggctcagatgattctcccacattagccttccaagtagctaggactaaaggcgtgtgccaccaggccaggctaattttttgtatttttagtagagatggggttttgccatcttacccagggctggtcttgaactcctgggctcaagtgatccaggagattcactgccaaaaaggatataaccaagtcatatagtcataggttatctaaagtcaatgtgaaggcaagaattctaagagcagtgagacaaaagcatcaattaacttataaaggaaaacctatcagtctaacaccagatttctcatcagaaaccttacaaaccagaaggtattggggtcctaatcttttggcttcttaaacagaatagctctcagccaagaatcttgtgtagagtgaaattatatttcaaaatgaaagagagaaatacagtctttttcaggcaagcaaatgcttcaggatttgtcacggctagaccatcctacatggaatgttaaagggacttctaaatcacaaaacaaaagatttaaatagaacagaatagaacctcttgaaaccaaaaaattcaaatggcctataaaacaataacacaataagaaaacaaagtagataacgatcaacatgatgactggaacaaatattaacattgaatgtaaatgacctaacactccacttaaaagacacagattggcaagataaataaaaaatcacaaaccaaatatcagctgtcttcaagagactcacttaacatgtaaggattcttatagactcaaggtaaagagatgataaaagatattccatgcaaatggaaaccataagtgagaaggaatagctatccttatatcatataaaacagactttaagcaacaacagtaagaaaaagacaaataaggcaactatataatgataaaaggatcaatcaaacaagaagatattacaatcctaaatatatatgcacctaactttggagctcccacattcataaaacggttatgatgagacctaagaaaaaagatcaacacaaaacagtgagggtgtcctgggttttctttttattggacagcagtgtactagcctatcactttcccagtcaggggatttttggtctccccattcccctaccatgggttcatgccaaagtccatattttttattagtgtttggaattggattttttttttttgaggtggagtctcgctctgttgcctaggctggagtgtagtggcacgatctcggctcactaacctctgcctcctgggttcaagcaattcttctgcctcagcctcctgagtacctgggactacaggtgcatgccaccacacccagctaatttttgtatttttagtagaaacgagatttcaccatattgtccaggcttgtatagaactcctgacctcatgtgacagggaaacaggcactcagtgaacttcatgcgattgaggagttaatgataatgagagaagggctgtgaggggacagcactggggacaccagagcctgtgacgggctgagttgctgtgccttgggagatgcccttttgactgagccctgggaaggagggggtgtgggggcaggagctgcctgcagagggagtggcctcaggtgggcggccacctggctgcagggaagaggtgacagagttcgtgtgcagagcttggagggtgaggaggaggtgggttgaggtgaccttggtgagggtgaaccatggggggctgtgggccctgctgagggaggccagccagccctggacctacagggtggtttggtcttttttgtcccattcccagcatccactgagtggtgaaactctgcaggccagggaccatcccactggccagaaggagcgcacagtaggtgcccactcagtgcatgttgggctggacagaacctcactctgccccctgcccccagctttgggagctgcagcaaggtccctccccctagggatctccatgcctctgtctctgaggggtgagatggggagacttcaaagggccatctcagagtgtgggggatagagacgcagaagtgtgggggatagagggaggcctgggctctagacccaaaggaccttacacacctcctgagtcttttcaaatggtttcttctgttactttaaaaatgatgtaagtcatcatatttattgtaaatcccaggaatctaatcatgcgtaaaataaggtgtcttatccttgaccccaccccttccccaattaaatttccaggatgttaccactgtttgcagttggtgtgaatctctctttaataatactctgtttatctcacttgtcgttttacgccaaaatacccattgaattatattattgctgaagaccattcttttttttttttttttttttgagatggattcttgctctgttgcccaggctggagtgcaatggtgtgatctcggctcactgcaacctctgcctcctgggttcaagtgattctcctgcctcagcctcctgagtttctgggattacaggtgcacaccaccacacctggctaatttttgtatttttagtaaagacagggtttcaccatgttggtcaggctggtctcgaactcctgacctcatgatccaccctccttggcctcccaaaatgctgggattacaggcatgagccaccacacctgcccagaccattctgttctactgaatcatgtgtggtgggcacctcttatatcaatacatatggattttatcttgtgtttgttattggctcccctttttctcattgcatggctacactcaatgctttgtccacacccctgttcctgggttggaatcttgtgacagaaaatgaagtaacaaaggctaaagctttctaaagtggagtcaggagattgcaagacaattgcactttcaccagcaagagctcaaaccacagaatgttccaatagatttggataaacagctgaagtcagtattcaccagccttcaacatctcaactaggagaaccctaaaattaactaagcacatagaatggaatggacttgtgatttaggattccttctcagccaatgagctgcttctgaaaacaactttttgtggaaattacctgtaaagaaaaccctctcctgtgcttgtcttacagaacactagtcagggctgccctgattcagtggacccgaattgctattatttgtttcctaaacatatggtattttctgtgaccttcatctcaatcttttttttaagttactgggctgtttcccagttttcataatgacgagacattctgcagtgtttcatacacatgtcttttccccatgtggagtattgatccaggagctcattcagtcaacgcatgtttatgaagcatcctgtgccaggctgtgggctggtcactgtcttcagcagagagaggacaggcacagtcttgccttcacagagctcacagctcagggaggctcttagaagtgggatactggtcggagcatgtgcacattaaacatgatgaggtcaaggttgctatagggactaaaccacagtcccaccaagatcgcattgagttcctgtggtagaccagaggtcagggcccctaagatgtcctgagcagctccctctgctcagaagttttggttccacaggtgacacacctgagcacaggtgacccctgcagaacctgtgattaccacccaaagccaagagtgagtggtgggtgttctaggaggaaccgtcacctccatgggcagggttggggaagactgaggggagcaggtggctgatgactttggccagaaggtagggggatgggcaggtgtgcgctcatagggaagggaagagaagggagggcattgcaggcaacaacacaaaggttggaacctgccttcatggactgagaaaagcagggagtccacccaggctgcagctggggagggaagacatggggagcagtgggtctaggggagaagcagactgcgattgaccttggggactgggcagtgagcagaggtgtgttatgtgtgtctgtccccatcatagatatgaggaggggtgaggccgcgggtggcacctgggtcggtgggatttcatagtgcctgctgttccctagagcctctctgtatagagggtcagaatagatctgaggctgtggtctgggggaaggggctggtggtgcttaccatctctaggggtgggaggagagggatgaggatgcccctgagcagtgaagcctcaaggtgtgtggagccacagttgtctctcattagacatgtgttttgcgtgaggatgccagggcctggtggttattactgttgtcaagtttgcatgacaaggacccaggtatccagggatccagagcacagggcccctggtgaggggatgaggctcagatggggctgaccaggttcatgtggtcagagtgggagggactgatggagagacagagcctcaacccctcctgtcaggagctgtggctatgtccaggagagatgacaaggatgacccaggacattgagtgagtcattgagacattgaaggtgaggacagggcagagaggaccctggtgactgctgaaatgtaggatgtgaggagggctctgacccatgcaagttacaggacctccccacccccgagcccacagatgacccttaaattgggcatcctgagtgctgtgtgtgcccagcagggacactggataggctggacctgagtctctgtaagggcagcgctggtctgtaggaccagagtcttctctgtgggtgtgacgtgggcaggaattagcaagatgggggtgacaaggcttggcttggaggatctggtacagaagcccatgggcttggtcagctcagcttctcaggggctcagctggggctggaggagcaggatgctgtgctcagggcatgctccaggcagcgtgatgtgtgtggttccagggtcaggcacgggggtcaaaaattaaccatgaaaagttcccaccttctgtaggcagagaaaatggcctgattgtcagggtcagggagacttaccatgtggccaaagcaggctctcagcctcccagagaccacaccctgggtgcagcactcagctctgcagggtatggcaatagatgtgccaagaaccccaacatccagatgcatgcaaaaattttgcgatatataaaatagagcagatcaagtttccctgcaataacgttgttcctggttgtgtctttttcttgtaaactagacatggacatctttccagcagtctgttctcatctgccaccttcctgctgcagcacctcagaatgaacattcctgagacactgtccgtggtgctgacgaccaagagctatggaacagagtgtgatgtagaatcttctagttacctctgctctcctttcacttttaacaacagagcatcattaacaatgagaaggtggagaggtgttcaggatcttgaagtgacttctgtcttgctctcccataaccctgaagctgctgtagacattattgcagaaactgacaccacagtcaggatggccttgtccaggagcccatgtgcagtttgtagtgagcaaggatgagaaaatggtcttgaaaggggtgatggacagaacaggggcttttcaaaaatgtcacatcatcacccccagcatccgtgaatctgtcacatggtaagagaccttacagattaaatgaaggattatgagtttggaagattattgtagtttatccagatgggtccaacataatcacagaatcccttccttacaaatgagagagggaggtgggagagtcagagaaggaggaggagatgtggggatagatgcagaagacagagcggtgtcaagatgctgcactgctggctttgaagatggagaaagaggacacagccaaggatgcaggaggcctctaggaggtggaaaaggagaggaaacgcactctgccctggagcctccagaaagaacgcagccatgtgggcaccttggttcaagtttctgtgtcacttagcttgtgggaatttgtcacagcctcaacaggaacctacagaggagtcaccttgtgtgcaggtgggatccagggtcatttacagctaaatcctgatgtaaatattgcaggttgcttttcctacttcctatctcatggccaacaaccctggacaatggcagaacacccttggaaaccacggctctgtgctttagtggagggaccagcttgtttgtgggaaggtagcacctggtccaagtgaacctacatgagatcgttactctccccagggccctcagggaagggctgagaacagctggcccaggtgtgtggaggagctgcaggtgaggcagggctggaggggcctgtgggtccaggtagaggggcagacaggttgtcccatcgccatgggagcctgcacgagctttaggttggggaaccctgctcctctgacctggacgctcctgtgtggagaggaggcttgctcagtgagatccacgccagggggtaaattgggaactgatgggaaatgaggggctagagtcctgggtagtgcctgggaggaccttgctcaaggactgaattcttggtctgttcccaccttggttactctgacaacccctctctgtgtcccacggggataaagatctcctgagcagtggccattgggacagaggagaacctggtggccagagctaagcatccaggatcctggatttggggacaggcaagctcattgctgggggacagtgatagatacggcctccagggcctgggtgaagagagcaggagggctcaggacactggaggctgtgtggaggtcacacccacgatctgtaccacccatggatgctcctgcattgctcacctttgtgtggacatcagatggccccaacttttgcactcctgagacatctcatgcattcacagagggacccaggctggggctgtgcatggccttggtctctagggtagtgtgaggacagctgagcactcagctggctgggcaggactcctgcgaatcctgccctttcctgtgtagggtccaccccagcctgactcctaaccccctactcctgtctttccagggaagagagactggggttgagataaggtggagatatttttcctgtgtgacccaggagagaatggacatggagtttcaggtgagtttctgctaagttcccatgagcagaaaaagagccaatgagaggaagtttcccctttattcagatcctttccaggtgaccccgggtgggccataggcccattcactttccctgcaagcccccgcttcctgtggtgatgggaagccttcgccttggcccacccagagcccggggcagtctgttgaggtctctatatattcagcagggacccccatcccttcctgtccccaggcctgtgtctcctcaggactcagagctggttctctggctcaggctccatgtccttccccatccccagggctgggggcttcagggacgctccatcaacccacaggagcagctcccagaggaacctaagaagccacatctgctttgtggtcgatccagcagtaaatgtttgtgtcagagtgtagcaattccagtaaaaacagagaagaggtcttgacccctgaggccttctcagaacagggtctggcatctctctctgggcccacccagggctactctgggactgaacctggctgtgctcagggggttcctgctcccaggcccctccctcctctgctcaccacctcctgttattttcactgcagtttcctgaacttcagctcagccagatgccagtggggacagatcctgggtctccctggggcccaagggaccagaatatctgtggcccccactcacctcatagatgagagcagctgccctggtgctgggtaggggaatctgggcaggggagagaggggtgtcaggggacagggaaggattcctgctgtgtaggaattccagggctctcctcaggtgatggagggtcccagggtggggttagcacagggagtggatgatcctggccctgaacagaggcccagctcatggccagggcaggtctaaccttatccaagtcattctgggtagggtgggtttgtgctggggattgacagtccccctgccctgagcctgcacagctggggccccagtggaaatgggattgggaacggacagtcttacctaggagatggagctgtcagagggtccatggcctggggacagagacaaaagtgagcacgagagtgttaggatagctgggcccctcctgcaagagtgtgtgggggtcctcagttcttagagaattggggagagggagcctttctcaggttattttaggggtcaagtaagcaagtgaggttgaggaagtgacccatgacccagagcccggaggttagggctgacccggccagttggggtttcctgtgtgatgttttatgggatcctctttgcagccccagggatagggtcagaggcccctgggtgtaactggcaggagtggacaacttggggctggcttagtagttcccagccacacccagactgaagggacactcaccgggggtggaggctgggggctgctgctccctgaagtcactctgatcgctggccctaggaaaggtcagggttatttgtgaaggtgcaaggttaaaagtcacaaattggagttaaaataggggaccaggaaaggagcctatttccaagaggggtatggagacctcctttctttatggagttctgtggtaggaggggcccaggtgaggggagttgaggaaaggccttacaaagccacatctgtcctggccagaggggaaggactctcaggcagatgctgggccaggagaacattgatccagtgacacaggaaagggactgaggacccagggaaggaatcagaccaccaggggttgcctgagaggaagggtcaaggcaccagggggaaagcagggccaggcacatgtgcaggacactgaggggactgcatgcatcttggattctcctggaactcagtgtccctgctgtgaccagacactccactcagggctggagatgctgaaatgggacaatgatcttgtcttctgtctctgccctttggcaagagacataaacgacattccaggatatgccatattggggccccggttctcccttctcacagctcagtgtctgcagttaccatgtcagtcaaaggggtgctgaccccacccagcccgtccaggctgttccagtctccactatgtgataatgcccaggatcccccctcagatgccctctcactgggtggatggattcagtgaacagggggaggtaccaggtattgagcaccgctcccccctgctccaggcagctgtggctttgctgtgctaggaaactaggaccatgctcaggggcatggccttaattggactgaattcactgaggacaaagctgttgaggaagcagcccagggtcagcagctggtgaggaaggtgccatggaatgagagggaaggatccctggggagtcgggaggctggggagagcctggcactgaatacaagacagggtctccttccttctcgcctggggtcagcgtgaaggatgggagcagaatggggaaaagctgtggtacctgccagtttttcggaggagcaggaaacacacaagtgcagccaccagaagactcccaaccaggaccccgatcaggatgcctagagtgttgtcatctgctgaaagaagaaggcaaaggggatgaggtccaaatctgttccagggggaaccatgaggggccttgcagggcaggggcatggtcagggaggaaggaaatgccatggagcctgagtgtggtctgttgtgctgtcctcatagctggctcccttgctctccgtggttgcaccattttctgtgtcttaggcttgaattactgggatgcatcaactcctacattctcccacaggaagcctgcacctcatcctgctcctgtgttttttagtccctccttcctctcacatcactcctcttccccctgtttctttttttccatcccatggcagtcgtaaagggcaggcccttgctgccaactcaatgctgatgagcagggatgatgttcattgactgttttcaggggccttccacatggaaggcacagtgggaatcaatctacctgcagcttttctcaccctcccattgccttgagggagaagggtatgtgatattgtgaaatacgtatttggtgttcatcaccattgatatggttaggctctgtatccccacccaaatctcaccttgaattgtaataatccccatgtgttatgggagggaccttgtgggaggtaattgaatcatgagggtgggttttttccatcctgttcttgtgatagtgaataagtctcaggagatcagatggtttcataaagggaagcttccctacacatgtcctcttgcctgctgccatgtaagacatgcctttcaccttccatcatgattgtgagacctctccagccatgtggaattgtgaatcaattaaacctctttcttcatacattaccaagtctcaggtatgtcttcattagcagtgtgagaatggactaatacagtaaattggtaccagctagtggagtgctgctataaagatacctgaaaatgtggaagtgactttggaactgggtaacaggcagaggttggaacagtttggagggctcagaagaagacacaggaaaaaagtttgaaacttcctagagacttgttgaatggttttgattaaaacgctgatagtgatatggacaataaagtccaagctgaggtggtctcagacagagatgaggaacttcttgggaactggaacaaaggtgactcttgttatactctagaaaagagattggtggtattttgcccctgccctagagatctgcagaactttgaacttgagggaaatgatttagggcaactggtggaaaaaaaattctaagcagcaaagtgttcaagatgtgacttgggtactgttaaaaacactcagttttatgtatttacaaaggtatggtttggaattggaacttatgtttaaaagggaagcagagcataaaagtttggaaaatttgcagcctgatgatgcaatagaaaagaaaaatccattttctgaggagaaattcaagccagctgcagaaatgtgcataaacaatgaagagcaaaatgttaatccccaagacaatggcaaaaatgtctccagggcatgtcagagaccttcctggaagccccttccatcacaggactggaggcctaggaggaaaaaatgtttcctgggccaggcccagggctcccctgctgtgtgcggcctagagacttggtgccctgcatcccagccactccagccatggctaaagagggccaaggtacagctggggccatggcttcagagggtgcaagccccaaaccttggcagcttccatgtggtgttgagcctgcaggtgcacagaagtcaaggattgaggtttgggaaccttcgcctagatttcagaggatgtatgaaaatgcttggatgtccaggtgaaagtttgctgcagaagcagagccctcatggagaacctctgctagggaagtgttgaagggaaatgtggggttggaaccccgacacagagtccctactggggcactgcctaatggagctgtgagaagaagaccacaatcctccagaccccagaatggtagatccactaacagcttgcaccatgcacctagaaaagctgcagacactcaacgccagcctatgaaagcagccaggagtggggctgtaccctgcaaagccacaggggtggagcccaaggctatgggagttcagctcttgcatcagtgtgacctggatgtgagacatggatacaaaggagatcatttcagagcattaagatttggctgccctgctggattttgggcttgcatggggcctgtagcccctttgttttggccagtttctcccatttggaatgggtgtatttacccagtgcctgtacacccattatatctaggaagtaactaagcttgcttttgattttacaggcttataggtggaagggacttgccttgtctcagatgaaactttggacttggacttttgggttaatgctggaatgagttaagactttggggaactgttggaaggcatgattagttttgaaatgtgaggacatgagatttgggaggggtcgggtggaatgacatggtttggctcttcttcacccaaatatcaccttgaattttaataatccccacgtgttgggggaaggacccagtgggaggtaactgaatcatgggggtggattcttcccatgctgttctcatgatagtgaataagtctcacaagatctgatggttttagaaaggggagttcctctacacatgccctcttgcctgccgccatgtaagacatgccttttgccttctgccatgatttcaaggcctccccagctatgtggaactgtaagtcaattaaacctcatttttaaaaaaattacccagtctcaggtatgtctttatcagcagccaagaccagctcggtcgcggagatcctaacccagcagtgctagaggaattaaagacacacatagaaatatagaggtgtgaagtgggaaatcagggttctcacaggcttcagagctgagagccccaaacagagatttacccacatatttaataacagcaaaccagtcattagcattgtttctatagatattaaattaactaaaagtatcccttatgggaaaccaagggatgggccgaattaaaggaataggttgggctagttaactgcaacaggaacacgcccttaagatgcagattgctcatgctattgtttgtggcttaagaacgcctttaagcggttttccaccctgggtgggacaggtattccttgccctcattcctgtaaacccataaccttccagcttgggcattagggccattatgaacatgttacagtgctgcagagattttgtttatgaccagttttggggccagtttatggccagattttggggggcttgctcccaacagactaatacacccattttctggtatgtgactctaaagtccttagaatcttcaaagtgatgtctttttcaagctaataattgactgatgactggcagcccctaggcaacttcagaatgaggctggtcactgacccaggtaggattagagggttgggactttcagcctcacccctaatccctggggagggacctggagtttgaattaatcaccaatgaccaatgaatcaattaatggccaatgattgaatcaattaatggccaatgattaaatcaatcatatctatgtcatgaaccccaaaaggactgggtttgaagagctgaacccatggaagtttctggagtgtggtgcatctggggagggcatggaagctccacaccccttcccacatgccatgctctgtgcatctcttcatctgcatcctttgtaaagtcctttattacaaaccggtaagcctaagtatgtgtttccctgagtcctgagagctgtttgagcaaactaatccaacccaaacagggagtcatggaaacctcaatgtgaagccagtcataagaagctctggaggcccagacttgtgactggtgggaaggtggtggcaattttgtgggactgagccctctgctgatatgtccaggtagatagtgtcaggatggaattggaggacacctagctgatgtacggtgcagaactgattggctgctgggtgtgtgggagaaacccccccgcatcacatttggtcacagaagtgtgtctgtgttgatgattgttattgtggagtgagagcagaggaaaaacacagtttgagtttttccaaacagggtggaatcccatctgccaatttagaatctgaaacttatagtttcagtacttcaattaagattgaagtacttcaattcagtacttcaattaagattcagtacttcaattaagattcagtacttcaattaagattacagaactggtaagtgaaagtgatacaacaaaaatgtaaccaaagtctgctcaacttaacagctaataacaacaaagttcataaaaataataccagtcgatattgatagcactgattgagccctggctctgtgcatgaccttgttaagggctttaatcgcattaatctctgaataaatatcctcacaaccaccctgagatccaggtgtttgtaacaattctacagatgaggaaactgaggcccaggaggttgagtgtcttgcccaaggtcaaatacctggtacctattgtaaccaggatgataactggatgagtctaatccctgagttcttacccacattgctccccaggctctgaaggaatctcatccttctcattccgtgtatcattttacaccccccctccctcctaggaaaatatacaaggaaaggagtgagaggggccgagggtcactcacattttacagtcagcttgagggggtcgctcctgttggagctgactgggttggagacctcacactgatactccccagcgtcctcctgcctgatggggtctatggtgagcatatggttaaaccaggacagcttcatcctcttcgtgacctgcagacgctggttgttgaaaatccactggaaagaggttccagtgttatttgtgtggcaggtcaggaccacggagcccttctctgtgactgtggtgctgctggcttggatggagggctgagccactgactctgtggatagagtgaccaacagaaagtgtcttggggccatgctgcatcctcagagatctcagagtcaaatttagaacattctcctgtgaataaaggagaaagatgaaggacagggaggagcagagagaaccagagacacccatagcagcgagcagtagggactacagtgacctcagagaccccagggaccaggaggacccagctgcctcagaccaggaccagggagccctgaaaaccctcccacagatgagcggccccagagtcacatgagatgcaatacctggggtggctttaggagcaggcagtcagagaaatggaacatgggtctcagcccctaagggacaaggaagaggtgtggccagctcctcctaggatcctacatccaggacccagtctgtaaagaggttatgattattcctttcttttttcattaattccctccctccttcatcagagaactactgagtgtgtgtctcagttgggccttgtgcaggtacagggtgtagtgggaagagaaagctgagtcctttccttcatcctcccatgggagtgacatcaacaaatcaagaaattcatgatttcacgtccagtgagggaagaaatgtggatctgatgggagaggcttggacaatcctggcattgagtctgatagttgagacaggtgatttcgttctaagtaaaaactgactaattctccatttgcccgtcattcctcagaccagaatctccctctctgagctgaggatgcccaagaagaaaggagctgaaccaacatctggtcctggggtccacagatgccccacggtggtggccacgaccagattctgggctgcagacacacggtggtgtgacgttgagcactgacagcctgtgtgatgctgatgcaatttctctttaataaaatggggtaaatgtcaatggtccctggcttgccatcctctctgtaaattaacattaaaatatttacaattacctgacctaaagcttggcacagaatagctccaaataaacatcatctattattattttactccaaaaaaaaaaaaaaaagagttctctgggcctgattcctggtggagaaggagcggtccagagtgtcttttctctgctttccctcctcctgaggacagtgcacttcccgggacatcttttaagtttcccatccagtttaatggcctgggaagtttgtttgtctgtcctctccactctgactctcaggtgaaagatgaggctctgcccttgcccagatggggctctgggggctgagccctgcctggtgaccagctctaggaaccacggccctgggacagctggtaaatcgttgctcacaatcagccctgcccaggaagccacaacccagccctggcacaggctccccagggtcatctggagtcaggatcttgggacaggggcctggggcaggggcttgaagggctgagcttctctcagaggatcctcaggccaggccctgactgagtcctataagatctttctcaggtcatgtctatgaggaggaggccaagcggggttggactgagactgattttcccccgctgcatctcccgcatcagactatccttcttgctgtagggaatttccacggagtccggataagggaaaggaattctgatctgttatagtttgtctcccctgggtgtgtcctgcactaaatgcccaaaccccaacatgggacgtaatgcagagggggatgcaggcacagcccaggcctgacaatcctgcgtatgtgaagcagaactgacccccaacacccagaggcacggaggaatcactcaccgtatacacggagatggtgagatgcctgttcaatctgagaatttctgtatgtgacttgtagggtgtagtatcccgtgtcctctagggtgacgttctggaaatgcagatctccactgggtgatattgtctctcgaccgctgtatgcaggccctggagtcctaacgtgagtgtctattacatatgctgcgattagctggttgggctccaccgttttccctttgtaccagccatagctgtaaagattctcgggcagataaaccacagagagatgaacattctccccttcagcaacttcaaagggcgctgatgcaataaagagccaggcagtggtgggtgcgttccagaaagttaaaagtgaggctaggaaagggagagaatatcagtcaatatttgacctatgcattggcatggaaagacggggtcctgggtgcaggtctcttcacccctcagccttagagggtgtgtgtgtgtgtgtgtgtcctactgggtcaaagtcagcagcatgaccctcattccttcagtacctctgaccttggcatttccttgtgtgaaccctctttcccaggggtctgcatggttccctccccactgccttcagttcctactcacacaagggaatccctgggagacttctttcgtgaagcctcctctagagaccctgggtcttccctttctgacctttcccagctctgttccctccagggctcttgtcagcacctgacctcacattctagatctctttgggtgtctgtcttcccccccatgagattgtgagctctgtgagggcatggacttgagtgatgttagttgcaccccagtgcctgggacaggctgcagactcctgtggatgagttcatgagcgttcccagggccttccatatcctggggtttatttgctaatgtctgaggttggcagatgaagacagagtttcatgccctggtggtgtttttatttaaattgtcactgtgatatagttttactatcattttcaaaatgtagtggccactgacaatgaacttgaaaacatggaccaactgagattgttttgccccttggcaattccagttcacttagattttttggttctccttagacgctctctcccctgagtctctaacaaaagccctctgtctcctctcagagccccatcctccccaggagaccccagccagtctctgtgctccctcctcccacccactcccagggagtcctcccctcacctgtgagcaagagcccctgccaggggatgcattctctgtggggacaagctgaggggggccccatggtctctgctgcctgctctgtcctcctctgtggagaggagcttgggctccaggaacgctctagacagggttactgtgactgttgtctctgctgtccttccttcctctatgctgagcttcctctcaggcaggagcacttcccgtttatgggcaagggcggggctctgcctacaatgtctctctgtcccctcccctctcagtcctgcctcccttgtccctcctttctccttcctttttgcctatatttggttccctaggcaaaactttgagaagcaacgctgatggggtcctcataacaggacgacccactctccccagtactgacctctgctgtgttctggccttggttctgtcacagccggtagattatttccctttgtgacacacaaaaccagctgggccctgggtctcctcatgctctccagtgctccaggaaggcagaatgatgcccagcaggaaagtgacagaggtggctctgggggctagaaaggggctcactgggtgatggctgggaaggacccacccgctatcttcagtgtcaccagcctggcctctgacccagggacagagacccaggcctggaggtctcgggaggatccccagctcctaggtgtggagggaggtgtcctgtgtgtcctgggaagagaggactttgatggaaggaggtgggaggctctgggttctgctgtccttggtgaaggtttcagggggaccctctccatgtctggggtctgtgcccccagcttaactctcattctctttgcaaatacatatattttgtggatctgcagttgcctgaactgtctcatgtccctaaatctttgtatccctttttacagaaggtcaggaagggtgtgtacatgagtatgaggactatctgatcagggcgagtgtttgtttcccaaagatctctttagatatggtataatacataagataaatgtactgaattagcaattttaagtgtagaattaaatgatactaattctattcacaatgttgtacaaccatcaccataattttttaccagaaaatcttcattataccaaatggaaacttcatacttttaatcaataactccccacttccccctgccccacccactggtagcctctgatactatcaatctctgtgaatttgcctagtttacatgtctcatataataaggaattatatacgtgtattatttttttctggattatttctcttagggtaacacttttaagattcatccacgtcgtagcatatattacagcttctttcctatttatggctgagtaatatcccaatatatgtttatacctcaattttaattcattcatctcttaatggacatgtgggtggtttccacatttttgctattgtgaaaaccgctgcaatgaacttacacttggaagtatctgtttgggtttctgtgttcatttctttgggggtacatataggagtataaatatggggtcatgtggtagttctatgtttaagtttttgagaaacagccaaactgttttccagtttgctgtgctattttatattcccatcagcaatatacgagggttccattttctctacattcttgtaaacacttactatttaatattttttaaaacttatagccattctagtaggtgtgaagtgatagctcattgcagttttgattttcatttccctggtggctgatgaagttgagcattttttcatgtatttactgacaattttaatattttttagagaactatttattcaaatcatttgctgtttaaaaaaaatgggttatctttttattattcagttgtaatagttctttatatattttagatacaagtcccttatggggtacatgatttgcaaaatttttctcatattctgtgtcttctcactttcttcatggtgttctttgaagcacaaacatttttaactttgatgaagttcacttatctatttttaattttgttacttatgctcttgatgtcatattgaagaaaccattgcccaatccaagatcattaagttttactcctatatgttcttctaatggtttgataagttttgctattccatttaggtttttgaaacattttgagttaacttttgtatgggctgtgaggtaggggtctaactacactatctcgcatgtggttatccagttgttccagcacaatatgaagaggctaccattctttccccattgaggaatcttggcacccatgtcaaaaaccaatgggctgtaatggtgagggtttatttctggactcttgattctattccattgatctctatgtgcattcttgtgccagaagcacactgttttaatgattgtagtgttttagtaagttttcaaattaggaagtgagtcctccaatttttttttccagattgttttggccattctggggtgacttttaaaaaagatgtagttcaatggttctcaaagcaggagtggttcagctctccttttttggcagtctggagacctttttaggaccttaatctaagtagataaattattcccactttcttttctgagttgctatgttacagtgtatattgacacccatgaaataattgagagaccctggaagtgcttgcctacatagtgagggacaattagttccatgatcatgggcacagaagattttgttttgggaaacaattttgttggtggagttatattcatgcttactcttttatttgtcttcatagcctgcatctccttcagacttcatatctgtttattttcttgtttgtcctctggggtttgggtgttgggtgaccagtcagctggagctggaggaggtgcttagcaaggcagtgaccctggttgggaggagcagggctcagcagggtgaaagtagctgggccttgagtcaggagtggcatctggaaggcctgactgtaagggtcagaagggccagcaggtgggtgtcctaggcacaaacggtggctgctgctgtggactggaggaaggtaagaggccccgagtattccatgttcttactggctccccaactgaggattcctctcctgggctggtgctgtcctgcagcagggaggggttagacagggacggctgcacatcaggccggagtccatgtcatcctcttaggcactgtcactacagattgaggattctgttcataagccaagcctttgcacaaggaagggacccgggctctcaaggaagagcagctcctggtcagacctccatctccttctctctcattgcctgaggcctcaagcttggtctacctggcacaggggtctggatcctcctcccagggttggggtcttactgagctgggcacctgcaggtgggagaagatctggaggggccccatctgccttcaccagattgatgttgagggtccctgagtcctgcaccactatcaggtgctgagcaacttccagtgtcagtgacaaccaccccatggtggaagcagaaccacctcgtgagaaagcacctccaagcctcagtgcttgccatgtgtgggaatttgctggtttcagttgggggcatgttggtgggtggtcatgaattcagggccggattctatgctcacagtgcacatgctggatgtggtacagaccccaggcagggctcagtggggtggttttgggtgtgcacaggtatcttttctggaggagctggtggtgatttggctcccagaagttcctgagctctgcagactcaccaagcactcaatatttgagtgaacattgggcgagagagcagaaggtaagtgtcagggcatcggggttggtgcctctgggaagaggaggaacattctgggaacaaagctctcccccggcttacagggagcttcccatcgctcctgccttgaggatcagggaaactagggcctctgctcttccaggggctgcttgcaggcagtttgctctgggagggggtgacccaggagttgcctctcattttgcatttgagatttaaaaggagaagggacagtatatcttgccaggtcacaaaaattacaggcatcatattgactgaagggcactcctgtcatcactgcaatataccagaatggtcttttaaaaaaataagtgatttaggtttaccagcaactgtaatgcttgttttattcttctagttcaccgttaatgtcacttttgtagttttagcactggcaatgttgattttatgttgactctgatgattttaagctttcatttgttcacatagagatcatcttctttctgaatattaatgcattttttctctatttctactggttattcctgtacatagagtagagaatcacttttcccaaggaggtggaaagcttctgactaccaaaaaaaaaaaaaagtgtcaaaatgctttaaagtcagtaacttaaagatcaaatccaagagtgggcaacagattctgcccagggtctgaaaggtggagaggtgactggtgaggatgtttaaaagacctctcctctctactccctaaatgggggccatccagtgttcttgaggttcagagaaggcccagggctggggcagcagggcactgtcagctcccagctcccaggggccaggagtaagaccccaacactgtccagacactgattgcattcattttgggggagagtagattcttatttaaagaataatacaaaagtctacaaatatgaacataaacagaaattcctttgctacaattttccccttaataagacattccttcctaatgacatatgtgactgcattcatggctgagatgttttctaggatggtgagagcatcagagtggactatctggtgccttggggtcatgcattttcttcttccaatgtctacaggatcccccatgtcccactttgtagtgtaactcagtgtgtgtcattctggtttttgttgtatagatccttggaaagcccatgtcattcctgctgtgaggtacaggcagccaaatggcatcatctctaaacatgccttctcctggtacatcaaattatggaataaatgaaagccattttgacagatattgaagatataagtttctactcttcccacacatgcttctcccaagtgaaggattttactggtgaattgttattagagattagtgtggatcagtgactctgccaggggaaattttgccctctaggggacatttggcaaagtctggaaacattgttggttgtcagagctgggggagggagtcctgctggcattgagtgggtggatggtgctgaacaccctgcagttcacagagccccaccagtttgaccacccaaatgtcaatgctgaggagtggagagccctgctgtgccctcccgcagcttccctgaagcttcccctcacctgctcctcccatgtctccccaccacttccccacttcacccgcctccttacacctcagtcccctccacctgaactcaccccttagtccaaggccagccctgatctccgctctcctggtctccttgctccttagcaggaggcgcccactagatggcgcccttgcccttactggagctcaccgtctccctttccaccctgagacaaatgtggctgcttttactgccacaaccccagccctccacactctagatttgctcagggagcagctcctggacagacctcagggaccccagggaggagcctcactctggagattttgatggcatggtctttgaacttcactgttacccccagtcaggatccaggatgttgggagtgcatgattctgcccggtcccacttcagcaggaccccactgctgagttgtctgtggggacccgggcctctcatctccttcttgcattgcaggagagggatcttagcactgctttcacataaagtcagataatggaggagtgcaggtgagtttgggaaggtggacatgaagagaggttgtgtccctagaggtggcagcagtgagaggatgggcaggtgggaggaacacagcccatccagggttgccagccatattaggagcgacagcctttcctctaagcctccagcctttttcctgaaacattccagaactttccacttcagcacttcccactgaggctcctcaggtctgtccctgagctcccagctgagcctacctacccatctgaaatcctgagtcctgtgtcaccctcgttccccattattctgtgcagttctgtgggacgcccagctctcctgacacccccagtcttcagaatggccatcagcgctgtcgctgtggcaccagggtgactgccgcctggaggctgagtcctggcttcctgacagctgtggggcccgctctaggctcccttgtcctgatcattcatcacctccaggatgcacagcagctgggccagggggaggagcagggacaggtgtcagccaccctgtgtgtctgcaagtcaggctgggggtgtgggaggacgccaggaatgactgaactttctgatttagagggtgagagcttgcactgatggaatttgggatttaataggaaaagcatagcgttttcctattttgtaggcagggtggctggagtttggaatcatagattcccctgggatgtcactgtggacctcagtcccacccgttaggggcacagatttcagaatccacaccctggggcaaagcaggcatgggaggctccatcagcctggccagggctctctatttgtgcagctgctgcaaggagatgtgcactctgatgggaacagtgctccctcctccttggggggcagtatctagctccctgcagcccctctccctgcaggccctgccctctctgaacctcaccttccccaacccgccccccgcaatcccatctcagctgtaatcccaacactttctcatccattatgggtggactgcttgagcccaggggttcaagactatgctggctggacaatatagcgagttgttgtctctacaaaaagacaaaaattagctgtgcatggtggcatacacctgtagtcccagtcactcaggaggctgaggtgggaggattgcttgagctggggaggctgagttggcagtgagttgagattgtgccactgtatacttcagtgtaggtaacagagcgagaccctgtctcaaaaaataaaagtaaaaaaaaaaaaagaaatatggaatacattattgttaactctaatcaaccatgctatgcaatagtccaccagtaataccagtaatagccaataatgaattatctgaaaaagaatacaatttattcttagctatctactgctaaaatttttaagctatcttttatgatagctgaaacaaaagaagtaaatttaaccaaggaagtaaaagacctttataatgaaaactgtaaaacattgatgaaataaattgaaaaagacacacgcacaaatagaagatattccatgttcatgaattggaagaactgatattgctaaaatgtccttaccacccaaagtggtctacagattcaatgcaatttctgtcaaaacaccaatgatattcttcgaagaagtagaagatcctaaaattagaaaccacaaaaattcctaaaacctgcacaaaacaccctgagttgccaaagcaatcttaaacaaatagaacaaagctagtggcattacacttcctgacaatcaaagcatactgcaaagctatagtaaccaaatcagcatggtcctggcataaaaacaagcacatagatcaatgaaacagaataaaaatcccagaaataaacccatgcatctctagctaactgattttcagccaaggagccacatgcacacaatggggaaaggacagcctcttcaataagtggtgctggggaattggatattcatatgcagaagaatgaacctagaccctatccctcaccatgcacaaaaaattaactcaaaatgtattaaataaagacttaaatgtaagaactgaaactatgaaactactagaagaaaatatagggggaaaatccatgacattggtctaggcaaagagtttttggataaaatctcaacagcataagcaacaaaaccaaatataaacaaacgggatttcatcaaactaaaaagcttttatacagcaaagaaaaaaaaggccagcagagcaaagagacaacctacaaatgggaggagaatatatttgtaaatatatacatatatatttgtaaatatatacatctgataagaagataatatccaaaatatataagaaaattatgtttctgtatagttttatctgactgggatacagaggccacatccacagtcccatcctcaaaggccacttgttcccaaaatgtcaagcacatccctcaatgatccatcatcaacacctatgtctgtaggatgaagggtgaatcatgaagcactaaaaaggaagaaggaagccaatcccaaaacaaaatgatgcagggtctggaaagtccaaagcattttttttttttttttactgcatcttcctcctttcttctccacattcccaatcctcactattgattaacaaaacaaaaaaaactgggacccaccatcttccctactgtcaggagatctagcgagattgtttgagtcttagaccaaactttgccataagccaaatttctggctgactttacaatgatatgagctagcacagtctctttttctgccagtcaacttgtgctcggttttatttgcaaccaaatagaggtggtaaccaaatataggtgaccctaaaattagtcatcaggatgaaatcctaaaatgtgcaacaaactgggttgaattcaggattagtagcaacatctctgttgtgggcttgaaaagggggcacccttttatgcagtagcaaaattgctaaattgttgtttgctgagtctttggactctcatcccggattttctatgaccattcaaacagggctgcaatgaacatctatggttgtttagcttggcacacttctacatttctatatagtaatatctagaagtgcatttgctcaatcacaagatatgcacattttataattgactgctatcgaactaccttaaatagccttaatttgttctcaacattgtttaacagggtctgtttaatgtcctacgtccagcaaggacagtatcacttttcttaatatttttcaaattattggaccttaacaaatacttaatgtgcaattaattgattcctttgtattcccatgccttcttttatatgtttccttatagtacacaaaaccacattattgtttctttacttgtgtcattccaccctggaccattcctatctaaactataacattatgagagagagagagagagaaaacaatatgaaaatataaattgattaatcaaaaaaatttaaataggacaaatcaggaagacacaagagagattttaaaattattcagagaataccacaatagctgtaccaatatattttaaaacttagatgaaacggacaactatctcgataaatgtaaattaccaaaactgactcatgaaaaaatggatattatgaatagagcaataatcagtaaagcaattaaaaagacagttgataatttttatttactgacaacaataacaaaatttcaggtcctgatatttttatggtgaattttaacaaattttcaagctcctcctcaaccaattctcagaaggtttaaaactttaacaagaaaacactttctaacacattttcagaagctgttatagcatgataccaaaaccacacaagaaaattatagaccaatctcacttacaaatatacatgcaaaatcaaacaaaatcttagtgaaccaaattcagaattaataatagcaaacaagcaaaatatgttatcatacgtatggcttatatcaggaatgcaagtatgtttcaacatcagaaaatacttctccacattaacagactaaaggagaaaaacgcttgtttaattatctcaataggtttttagagaattttgaaaattttataaagttatgcgtattctgtaaaattgatgaaatccaaccttgatttatttttaaaaattgcctttcctatagaattataggtaaaggaaacacatgcatcctcacagagctacttcaaggctaagttacttcccataagtaacgtatcctgtaatgtgtgcttggcacatattcaatactaaacaaatatttgcaaatcctcaaaccacttctcgctcaaataacccacctttgtcttttgcctttatgttagggttgattttctcaattgtatcttggagatcctttggtgggtctttcagcaattaccctgaatttgcttttctgtttacaattttaattcctgggaactctttcttgttctctgactgcacccttttcatgagagttcagccatcaatcctccagaaccccaccccccccgcccccccaaaaagcaataaagatgtctaaaagcttccttctgggctttcgaatgatgtttaccccaggcatttgttctattcgttcatcacccattttccctacaacttgcctacacttgatatcagatttttatttattagtcacctatcttcttcattggcccattttcctattttgccactggttgttctcaaatgtgttatgattcctggttgtacagtcaagtggttgataatcttggatatacgataaagatttgctctgtagctgtgtgtaagcctatataaaagcttttgtatttttcttcttaaaaaagacaaaagatggttgggaagatccctccagttcaccagttcgaggctgcagtgagctatgatagcgccgctgctctagcctgtctgtctgtgaaaaacaaggggggcggggggcgggggggaagactggagatgtaaatctcccgcagggccctacccgtatccgcaacaggtctctaacaggaacagcctcaggcctgtgttggaacaaggtaggttacagaaatctggaagccagatctgtaacttcagggtaaggactggctctcagggctgatcccccgggctgggtgtcccagaggcacccgcccccgccccttccccaaggcaggccaggacaccttcactcctctccttaggctccccacccccttctcctccccactgtgcctcctggagtagcggtggcggtgccacaggggagcggggcggggcgggctctgagggcaagggggatgggccccgccggggtcactggcggccaccctggaaactcgacgcaggccggcccttctagtgaatcgtcccagccacagctggcctcccagccgcgcttggggcgcctcggggcgcgaatggtgcaggttggggagactcaccacgcaccgtcgggggtcggtccggttattcctcaccgctcggctccagtgggcgcgcgggcctctcctcctcagttcctgcgctgcagtccctccctcacccttcgcagcttgggaatccaactgtgtcattccgacggagcgccgtgaggacctccgagggtgttagcgccaagtgatctctgtccagcgctctgaatatccaagtaaaggagttcaatgaagggcgggtcaacggaggagaaaccgtgactctctcaagggagcccaaggcctccttgtctaattagtgacgcgccaatggatggaggctcttcccaccatctcttcccagcatccagtgacaccaccgccaagggacgggctcggcggaacctgcaggaaagaagcatcggctgagcctgactgcagcgctgtgaagagacaggggaggggatcagtagttggtcccgcgcccaccccctgtttccgcgaggggcggagttgactggccatgcaggcagagggcgaaatgtgaaattccactactcctaccgtttttccctgacccgatggggcggagtgtcgtcaggctaagttccctggcggtaaggtggggagattgaggcgcacacctgccgaacggtaacgcaggattagctaaggcgagctcaggacagaagcctcccgaggagcaggagggcaaaataataaataaataaataaataataaataactcactccttggtctttatttgcggcaggaattcagaaggtgaaagcggggccttaggatctttctgaccttttgggttttaagcaggaggtgtcagaaatgttaccacagggctagctggcttgtggccagcaagcgttcacaatgccctcgatttttcatccctctctgtgggttctttttttcattgtaaggcagaatttctacgattgctcacccactcagagaacctgagctggtttagaccaggtgagacaggctaggtttaccctggtgatgatgtgttgttgccatggcgatcctgcccagtaccagaggccctgcagattcagatgcttggtgcctgtgcttggctgaggggccaatgggtgaagctgccatctgcgggatgatgactgaagcctctaagtcagaatccgcccaggctgagccttagggcagctccatggagcctcggctggcctgggatagagagtccaccactgtgccagcccccagccactgcctaggtcctgtgctgagagccccttgtccagggaaatggcgtccagtggaaaagggaccacccccttgcccttcactcaaggcaggttggtgacaaccctgaagctaatccgttcctagaggagctgcttctgggtccgagttttctctgcagcagagcagctccctggatgggatctgttcaaagtccgcctttcacgcggaattttccgtccttgcaattttccacctccaccactaggggatcctctctgaccgcctcatgccggctctggcctctgagcaggggtttctcttctgcatgtgcgaccttgcgcatgcctagtggccttttgggacctagagctgctccacaccccgatggggttacagagtgcctcgcctccactccaccccaccagggttccttccctggctgggatgggatttcagaagcgccgaggaacagcccagacaggtgtgggagagtagccaaggcccctgtcccggggtggccaggacagcggtggcctcgcataggacctggctgggctgctgcaatcagtgtcctgccccttggagagcaacagtgaaaacaacaagactatcttcacccaccttaagaaagaacagaaccagtatccccaactctgctgtgtatcccaacccaattccattccccaccccactctcagtagccaatatgcaaaatattagaatactcttactgttattattttcaaccacactctgcatcctgaaaaaccatatatttcgttatgtgcttttaaacttcttgaaaatgaaatactgaggctgggcgcagtggctgacacctgtaatcccagcacttcgggaggcggaggcaggcggatcacgaggtcaggagatcgagaccatcctggctaacacagtgaaaccccatctctactaaaaatacaaaaaattagccgggcgtggtggcgggcgcctgtagtcccagctacttgggaggctgaggcaggagaacggcgtgaacccgggaggtggagcttgcactgagccgagatcgcgccactgcactccagcctgggcgacagcgccagactctgtctccaaaaaaaaaaagaaaaaagaaatactgaattttcaaatacttgctttttttttcggtcaaaattatgttctcaaatttcactcctgtagatgtgcgtggctggctgtagtttttgcatttttattattaggtattctcctgttgcattaatatgccacattttatttctctcatgtttttggtgaccacttggggtgttttttggttttgtatttttgctgtatacatgctgccatggtggacatacctctttatacatatttcctgttgtatgcagacacaattttaggatgtgacatcttcagcttttctattgtgtcgtgtgtcttttccttcgtgctttgtgttatttacatattctggacacagattctttgtcaactgtatgtgctgcacatctctttcccagtttgtgtcttcttcttcttttttttttcttaaaaaaaactttctttatagtgttttttttttctttctttctttgttttgttttgtttttttgagatggagtcttgctctgtcacctaggctgaagtgcactggccgatctcggctcactgcaacctccgtctcctgggttcaagtgattctcctgcctcagcttcccaagtagctgggattacaggtgcctgtcaccacacccagctaatttttgtatttttagtacagatggggtttcaccatgtttgtcaggctggtctcgaactcctgacctcaggtgatccaccctctttggcctcccaaagtgttgggattacaggcgtgagccacagcacctggcctgtgttctttcttaagtagatgttacttttaatataatagaatgtatcatattttgcttttatattagtactttttctatctaattcaaacacatccccaagggtctttgtgtgtagactgaccaatttctcaagaatcatgaatgaatactgcttctctttccccaatttatctgtaatgctacctttattataaagtttctatgcatgtgtagaaatagttcctgatttttcactctgtgccaccagcataccaatagcacgctgtcttaaatattaaatagcagagctttatgagacaacttgatgtgcagtaggcaattgcccccttgttactcttcttcagggttctttgttgtaccacatgaattttagaattggcttgtccagctaaaagacaactgcaaggattttatttggaagttcataattctatacataatttggggaaagtattttcataataccaagtcttcctattaatgaacacagactctctctctctctcccccacccccacctgtttagttatttatatctttatggtctgttagttattgtttattgtctttcaaccaggtttcatgtttttctacatagaggccttgcatgtgaaagtctttcttcctagcttgctattacaaattttttttaattgcactttttgggtacagtggcttgtactgtaatccccgatacctgggaggctgaggcagatggattgcttgagtccagaagttcaagaccagcctgggcaacataatgaggtccctgtctcaaaaagtttgttttaaaaattgcatttgctgttattcaacaaatgtcattgtgtctcatatatggatttttatatctgataaccttgttcaacaatcttttgattctaacaatatatcagattcttttgagttttccatatagacaataatgtcatctgtaaattataattgtttcttctttgttatttcttggaccttttattttatatttttgtcttgctgcaaggcaatatccctctatatattgtggggtcttttttctcataaagtggggatggtgaacacccttgtcttgctctctgattgtataaagcatgctttctgtagcattttgtagacgctcttttttagattgaggtaattcacttttatttctggtttactgagtttttagcataaattcaggctgaatttgagctaaagctttttctggagacatcatttgaaaaattcatatgatttactttctttaagtcaccaaagttatgatttacattgaactgagtttctactgtttaactgtattcttgggagaaaacccacttgtcactgaacaatatctgttttatttactgctgtcttgtgtctaaattttcttttaggattttttgtatatgctcagattagcctgttattctcctttctgtatttttttctggtttgggggtcaaagttataatagcctcacaataagagctaagaaaccagccctaatggaggccggggcaggaggtttggagttcaagaccagtctgggcaaaatagtgagacccccatctctatgaaaaatagaaattagccaggcatggcagtgagtacctgtagtcctaggtacttgggagggtgaggcaggaggattgcttgagcctaggaatttgaggctgcagcgaactatgattgtgccactgtactccagcctggatgacagagcgagaccctgtctcaaaagaaaaaaaaagaagaaataaaaaggaaaagataaaagagctaagcatctgtttccttttttccattttctgggagagtatgtgtaagactgtaattaactgtttcttgaataatgggagaactctgtaaaataatctggctttggtgttacctgtattggaaggatgaaaaataccaattcagtttcattattggttgatagggctactcatgctttttgttttgttttgttttgttttgtttttgagaggaagtctctctgtattgccctgttgtccaggctgagatgcaacgttgttcacaggcctgatcctggctcactacagcttctaacttccgatctcaatagatcctcccgcctcagccttcccagtagctaggactacaagcatgcagcatcacatccagcctcttttcctgcctgacccagttctggtttcctttagttttctaggtgttcatccattttatctaatgtttaatgcatttggcataagggtgctcagtgtcctttcattgtctgttgtctgtaactgttgccattttcattcctatttatgagtactggcgtcttctctcactttttcttaataatcctgctggaactttgctttttaaagaacatcttttgacttgttgattcttttttcatacatattaactattttcttattttttgcctttatatttatttcttttcctgtttgaaacattgctcttttcttactataaaaatgggtaagtagctcatgaattaccacctcttttaaaaatcttttctactgtaagcattttagcagtttacatttgcccacaagtaccacttcagctacaccctatgtgcttttacataaagtcttcatttttggtaagacatattctcaaattttaattatcacttgtttttaaatccatgatgttttatttgaaatgttgtttctaaagatacattttctggttatacttttattcttctaatttagcacagtggccacaaaacatggtctgtgcagtgcatacaatcgatgagtaatttctgagctgtagtatttggcataatatatggcaaaatttcctaagttttccatgtgtgctttaaaaaacttccagtaaaatacataaatctgttagatcaagcttctcacattgttcaaatagtctatatgtttactgattcatttgactgcttgatttatcaattacaggtaggaatgtattcaaatctcctattaaagtgtgacactcaagtggctttttaaagacagagatgccaaaccaatgaatacatgattttccccaaagcctgcacaaattctctaatgaaattttaccatgaaagtttgtttaattaaggcttactaaagcagtatgttgtcttttactttttaaacagagaatatatattttaatacatcgtttaagtttatgattaattatctattactgaggataagaatctttgcctgtgctcattcagcatttgcacttcatttatgatctgccttctcatagcttctgttaatttttatactagagacatttatttgtttgtataaatgttgaaggtttttttttgttgttgttgtttttgagtcagagcctcgctctgtcacccaggctggagtgcagtggcatgatctcggctcactgcagcctccatctcctgggttaaagtgattctcctgcctcagcctccagagtagctgggactacaggcatgtgccaccaagcaaggctaatattttgtatttttagtagagatggggtttcgtcctgttagccagggtggtctcgatctcctgacctcatgatctacctgcctcggcctcccaaagtgctaggattacaggtgtgagccaccgtgcccagctgggttttttatattataaggagatgtaatagatagatagatgtttcaaagatagtcaaatgtttttaaaatttaaaacacttttttacaggttgactttcaccatttaatttcatctatgtgttttgccttagagaaattttaaatgctatgtagatctcatgacttataattatgaagcattttgttttctgttttccacgaaacttagcttaactttgagcatataatagttgtaaaggtaggagagtaacactgaaaaaaggaattgcataaaaatggcacattttctgtagagttgtttatcgcctgaaaataggccccatttcatggaagtaagatgatcaggctcaggtccccagacgaaactcttggcatggtttttggagatagtccagggctcagtactggctctatcatttgctacttctcccaaagtaaccaatatctcatccaccctgagcccatttccatatctctaacatgaggataatagcatctaccttacacaccaagtagagggatcaaatgtaggaactaaatcaaagtaccagcactgaataacctacatcctcccacttcccaaaaggaagagagatgtatcccctgttgacaaacgagaccattttgcaggagagaaaggaaatgccagttcacttgcaatgtaaacatgctctctctttttagggatgtccagggacctgagagagaacccatgcttaccaaagagtttctagttccagacacacaggactcgaagggtgacaagtatggttttcagggtccctgaatccacccagtcctcacagaaactcctaaaagctgtcgattgacagcgttgagttcacagctctggtcctcacatgctgatactgcttgtgatatcgaacccgacaggaccccacatcacaattgatttaccaactacaatataatacctcctgaatctccaaattggctcacccaggaacaaaggcttggggtaaaactggattaggagatataagctctgaattttctgagggtgagacacacaaggattctaagtgacacgccacagagtaacgggtctgtgactggaggacccacagatttgtcttactggagacaccacatgcacacaaactccatccttagctgtggaaacaagggtcttttgctatcttagccgaattctgggagtaatttttggaggggaggagatctttgggattgcctctttcaggccctttacaaaaatacctacttcttaaatggtaaagcttacactaaactgaaaaaattacatccttggctttttatgaagtaggtgttggattgaatcactactggaagaagtatggcatcgcaaattctaagcagtggtcaaaggatggatctgttaaattagaaaaatctctaaatttataaaaagattttagattcctttattctaaacaattgacctatttgtactcatgggacaatcaaatttcaaaggagatatgtaacgatttcatggcttgcattaaaaatccttctgataaaattaaagataaaaaatctgaccccctgccaaaaaaatcttttgaagttcatactgcctgctttcaatattctgtgggattcacaatgaaaggtgccttatattgtggcctagcttcaagtttatgccttcgccaccatggcctgggttcaattcccagtcagggccccagcgcctttggtttaatgtttgcgtggcatttgacttttttacctatttagtattggtgagattacctttggtaaaaaaaagtttaaagagtggaaatcgcaattctttgtgttggctaaaatctgattataagagatctggaaggttttatttttctttttcaaagagctctatggtcagaagtcggcttcatgaaaagctaatatttaattatatgtacatacagtctttctggattttctcttttgcctcctgttttgaaaaatatttggatttgagtgaaactccgttttagaaattaattgcttggtacaatatacccatgtaactaccctgcacatgtaccccctgaatctataataagagttgaaattttgacaaaataaaattagattttgaattaaaacaaataggtgcttggttcctctgctcacttctttttaaaaggaattcctctcccatgtacttcttcttttcccttctttaccttccttttggcatctttggtatcacatgaagggatctagagggaattttaagtgactctgaaattccttgagaaatacacaaaaagatcccactcaccccttttgggggtctcctgttctccttgtggagtccagagtcagggacaggctcctccaggtctgcagctctgctctcttttatttcatcttggctgattgctttggttttgtgagtaccaggcattactttgtactgtgagagacacgtcctttgtgagtgcaacggctgctgggtcactggtgagggctgcagtttggagatggctgagagccgttgcaataaatggttgtgattgcagggggctccttgtttctttgcaagtttagatgagaaaggtgcagtttggacacagtttaaaggctgtgaaaacaccaccaatgaatatgatttcctttggggatggtctgattaaaagtgggctgattgttgctgtgctactagccttgaagacatgtttctacagcattgtgcagtgtggaaaaattgtgtggcttggtcttgtggcatgtcccttcttttagagacctcagattcaatgtgaaattcgggatttttgattttcaaagatctagatgccctgccttccagatgtgcctactcttcacatattttaaaattagatcctataaactgcaaatactttgttggcttctgtgagatcagaggtccagttagaaaaggaagacagtttgttaaaattaaaaactatttatctaatctaactagattggcctccaaatatgactttctgacattcagctggttactctgaaaagatttctaaatctcttgaggctcatctatatgtttccttgcaaagaaaaaaaaaaaaaaaaaaaagcaagcccaagcactagtaagaaaaagatttgcaatgtttcatgaaaggagtagatgagtgaagcatttatttgtagatactgggttggatacctgtgcaaagaagaagaggtcaataataaaaattgccaggggatttcttggaacttaacaagctgaattaaatatagaaatgtcaggaaatcaaggcaggaaatactcacttgtggttaggcagacagggcagggttctgagcttgagatggagcaaacagttgtggtgggtgaagttcacatgctttagagctcagctgtcctagtaaagaagcctaagagtctctaaagctcttatgagaagatggattttttttgcctagattaaaaggttaaagaattgctttaagttggataaaataaagctaaatgtttaagcaagttgtgaaaggtttatgaaaaaattaattaaaatatttttgtgtgtaaacatattgactaaagttgaaggggtataattcagcatttctgtaaattgagcattgaaataaaaacacaatgggtttctcttagagcactaacctgctctttaacaaaaattgtaaagggttatagaaagtctataaaaatgttaccttatggtcaaacattaaaattgggtaaatatgtctatcaggttttattaagaattaggtttaacattaatagtacactaatgtaaaggtgaaatttggcttatttggtacaaaaatcatacaggaagcattgtgaaatataaaatgatttttagctttctttgggctatatttctataaatatgttattgatgagggttccaaagttatgggagactcctataattctgctatatctcagtgtacattatcagtcataattataattgtcatgttaaattattgtgggccacagaggtaacagatttccttgtcaattgtgtctttgactatgactaccctaaaacgttcagtcacccatatacacatgttaccttgttttggccctctttagaaggtaattttataatcagctataaagccctaacaggtgctcttaaatgcaaattttgataactttggagattgtgacatcagaagagaggaaaaatgttcgggacacttggagagctaaaatgttcattgatatcaagcaggacaggaattaactgcatgaagtgaactaataggaggctgaagtgatctttttgactttttgcttaaaacgttgctgatcctttgttttgcttttcagagtcaaggcaaattttcttttgagctattgacagcttttaacgattaatcaaaatatactcctatgaacaccatttggagcattatttgtttctctctacccgatttccccagaatttggaaactatttgtgggtattcttaatttatggcaatatagttatttgcataagtgcaataagaatgtgttttctttggtaacaggacacaatttgaaaaactggttattttaccaaggttttgaccagaatgctgtgctttcctttaaggaatcaaacttgacttgtggagctaataaagcctttggaaaactgaccttatatcctgtgaacacagtccctgtacagggttactgatctgtgggaagaaaagaatgtcacattctgacaggtcaggaatcccaagttatcttgaaacttcaagaggacaggaattcacccaaccatatgtatttgatggtagaaatccatggcaggggctcagctttaaaaagtcttatctcagattccttctataaaacaaagtcccattaaaaccaattttaaaagcctatgtgaaaaataattattcttgctgcacctcgtacaaataaagtggcaaagcataataaagcaaattggtcctgtcgtaatttgtctttagtaaaaacgggaaactggggtcgggtgcagtggctcactcctgtaatcccagcactttgggaggctgaggtgggcagatcatctgaggtcaggagttcaagaccagcctggccaacatggtgaaaccccatctctacaaaaatacaaaaatgagccgggcatgatggcgggtgcctgtaatcccagctactcaaggggctgaggcagggaagcggaggttacagtgagtcaagatcgtgccacttcacgacagcctgggtgacagagcaagactccatctcaacaacaacaacaaaaaagggtaactggagagagggaagttatgtttcaaaaacttttggaaactatagtacacctgtttttaaattctagtctggcattcagtttttattattttctacagtttgggttaaattcgtatttctctggctacaagtctcctaaataatcttttcatttgtttcctttttctttccctttttccccatttttcttaattggaaatcactgaaacctaagctgtgctttcttaaagccctgtgaactgaagactagacaaccgaaacttctgaaggaagtagcagcaacctatttatatgtgttgctgttgcctactattatgttttagcaggtgctgcctctacacccccgaaacagagagtgctactgggaacaaatcgactttttccactccagtgctgcattcggtgccccataacgatgaccccctctcagcaggaagtagccagaaagattacaatgctccatctccctatgattcttgtgataaataaatatacaagcatgatagaaatcatgcgcaaattgacagtggggattgtggcaggccagatttcactaatggaggtccccatcacaactacttcagtactgactgagtggttaagttcagtatcaaaagctgaaagtgccagcgcctttctacaaaggctagaatgtaacaaaagcccaccaagggttttacctaggcctttcctgggccttacagcatgacaaaacaaagaaggaattcttaaccagacctgtttaggattaaacaaatttaattgggggtctgaagaaactcgccaggcctccacaaacaagttcattgggggtctaaaggaaccccccccaaacctctgtgattgagcaggagacaaggtcagggtaattgccccagcacctggactcatttagatttaagtaaatgtactgaggctccagagaaaggtctccaagacttagactagagttacagattaaaagaagttaatcacttatatctttagataaatgcacactgacacgtagacatacatcttagaaaatatataagctctggaaaaccttgtaatttacagttggtctggagatattttctgggccttctctctgtaaccggttccagaaataaaaaactctcttcctccccagtttatctgcatctcgttattgggccgtgagaaatagcagccagaccctgagtttggtctgggaacacactggctgggcttcctgcctggcggtagagcttcactgtcctccttcccagccaaaatgtggcccttgaaggcttcctccccaactgaccggttttgggttctaggtactcagggaacaccgtcttcaaggaggccattttcatactgttcctggtttgatttttctgaaattaggaaatgccccttgaggcatccaggattgtctttatttcccctgaagcttcccctcctgaagaaaaaagttctcaaacaccctcaggactcaaaccccaagttcaccctgtgaaacattcccatttcctaaacccaggcaggctcatggccctcagcctctcagaccccatggaaacctcctcccccacttcacgggttctctccatattgagagcctcccctcctcggcacacaacccagagactcaccccaacatgtgtagcaaatcaccctggaaacaatcatggctgaacgtggtagcccatgcctgtaatcccagcactttgggaggcccaggaggtggatcacctgaggtcgggagttcgagaccagcgaggccaacatggtgaaacctcgactctactaaaaatacaaagttcactgggcattgtggtgtgtacctgtaatctcaactactcaggaggctgaggcaggagaatcacttaaacctgggagacagagattgcagagagccaagatcgcaccattacactccagcctgggcaagaagagtgaaactacatctaaaaaaaaaaaaaaaaaaaggaaaaggaaaagaaaaaaaaaatcatgaggcaacattgcatttaacaatattttatttatcaaaagacacttgtctttctcaggtaagtgaaggtctagagatgaaacgagtcccgatgtaaattgccccatgggcattgctgagatcacaagatcatcactgcagcatgcagcacaatagtaaatttctcaggatggaagttcaacaatccaaaaggtagtattttttttcatgatgctcagtccatcatacgaaataaaaataaattccttttcatgatcatccattcagtagaaaaaatgatagtaaatttgttctcatgaagatttttaccgtaacatataggatttatcgttattattattattctttgttttttgtttttttgaagcggagtctcactctgttacccagtctggagtgcagtcgtgcgatctgggcacactattaacctccacctccagggttcaagcatttctcctgcctcagcttcccgagtagctgggattacaggcatgcgccaccacacccggctaattttcgtatttttactagagatggggtttcaccgcattggtcgagctggatttgagctccggacctcgggtcatccgcccatctcagcctcccaaagtgctgggattacaggcgtgagccaccgcgcccggcctcaatttatcattattcacgcatccacaaactgggttcttatattttgtacgtgattttttccattgaggagagatatctgtgcatattcatgctgctcatatttcatccacaaactcggttcatatttcatccacaaacataattttttccgttgagaagagatacttgtacatatttatgctgttcaaattcacatttcatcattcttttacaagaaatagataatgtattttaaggttttccagtggtattacagatattttactgggtgtatagatagaaattaaaccaaacttctttgttctggccgccagtcatgcatcctgttttcaacatagttcacatacaactggttgtgtaaaaatgaaattattttgtttagtacaatcatcaacagttggttgattagatttttaattatcaagttaatcattgtcattatgcttctcatcgcactcgtcattaattgctgtgggaggaaatttgttatgttccctatgagagggtgtatcacaaattcaaataagaattcaacgacaatggactgtataaaggaaataagcaagtccatggaaaacatatttttttccggaaaggattaaaatatttttaaaaaggaattaaaaaaaaattgggcacggtggcaaatgcctagagtcccagctgctcaggagatggagacagaaggattgcttgagcccaggaataagttggaggctgtagtgaacagtgattccaccactgtactccagccagggcaatagagggaaaccctctttctaaaaagacaaaaagaaacaaaacaaaacaaaaaaacaccacatcaaaaaacccaacaacaaaatgaaaaaccaaataacagcaatacaattggagctattcgatccaaagaagtaaatgaaacataaagcaaataaaagagaaaagctaatacctgtgtcctgcaggactcagtccaagttctgctctgactccctcctggtgagccaccccttaaaaagtcacttggggcggggttactttgacagacagtcttctgtcaaagagggaggcggtaaatagcacttttttttttttaatttaacgcctttccaacaaattagcggctatgttgtctaagagtgcaaatgtcagaggtgggtacaggcagcaagaccctccccacaggggcagcagaaggaggaatgactaagggaacaagactttagtgtgctcaactacacaggacaggaaacagatgctttttacaaaagctggtggacttgaaggcagaatattttcaagttcctgtaactgcgaactatgacctgtagcctgtgagagtgactttctgtggcaaaggagcttttgtgaatgtgaggaagttaattatcttaacagtgggaggttctcccggcttatctagctagaccctcgtgaaatcccaagtgtccttaggaaggggaagcagagagagatttgagtccagaagaggaagaaggtgatgtgaggcccagtaggggaacaaagggcgatggcatgtaaacacttagcccccagaagtgggagagggctggggttcatcacaccagaatccctaacaatcagccttattttaattacccttgaaatggaaggaggccttagagagccagaggcttggaggggcaccctctgctgcatacacagatcccaactgctgtgggctccaaataattgcaccagggaaatcacaaattatcaaaaataaaggatgtaaagcttttaaaaaatattaaaagcccaacaaataaaaaaagttctaaatctataaaattgacctcagtctgtatatttagatgagtcatgtgtatatagcgtttcacttcaaaatatatgataaatctctcattcattggcttaaaaataaacacttcaatcaagtctttatcagaaaaattgaaacgttaactcaattgccttttagttcatgtgactttacaaaacttaaaacaataaagtcagttttaaaaattattagtaaagtaaaagaaaaatatcttcacaatgtagacattttgtccacatgagacatgtgaaatattgccattactaaatatttgcaggtcaaaaactgtttccaaaacattttaaataatcatctggcctgtctgttttagagcattcaattctagctgaggtctggggacatgtgaaaggagccacggcccgactccgtgctgggaagagtcagacattttccacagctctgtcctttgctgtgggctctgcaactcctaccaattaaaattgcttacgtttttgttttatttttactaaagaggggttcctaaaagctaacattatactgagtatatgtaactaaaactactaagaaaacaatttcacaattatacaaatgtgccaagtaaatgaaaaaataaactgtattttaataaaggttataaaaagaaaaacatatagtggtgtgaggactgtctcaggtcttcactgagcaagggatcatgacattctatggcggacagctgaccttggctttctgctcctcttgattatgtctactaagtgacatacttactctttttccacctgtcttgcctctaagggtaacaggttttatgagatccctcctagtgctttgcaggtcagcctccctttgctgcattccaattttactgcctataccctccagctggcttttgatgacaaaagtcctggtcccagccattctcagattctgtcatccccgtgggcactatggagctcagcactatgggaggttccccaaaaatctcgttttctatgaggaatggccaccacctgcatctcagtgatgctagtgacccctttcctactcctgtgctcactggtcctcatgaagatcctggttggtctgtagccccctatttttcctattaaagagaaattacagtaagacccatttgtgtgcaaaatcaattttaggcttattacacttggcctgataatttgcataaaatgcagcaagaattcatcggccatataggctacttttgagttaattttcctgggtttttacctaaaaatatactattttggttagagtcttgtgaaaataaccaatgtgttcaattgttttattttaaaaggctcttactgaacactataaatatgtataagttgaatatacaaactatattgtcataaaatcacaacccaaaatgtggagaacgcagagggaaaggtaaatttgctcgcaaaaacatacttcacccaaataactggaaaaaaaaaaagactttcatgacccttctttaaccagagcagcagctttcaaacaaggtgtttgccttggaaatgccattcacaagccaaacggcccttgagagctgtctgtcaggcactgtagaatctagcagctcctcacagagttagaaatagtttcaggaaagagattccctgcttttagtaactgcactttatattcccagatagcgagattgtatgtaaaccatttttatcttattctggaactcttttgggtactttttttttttttttttaaatgatggagtctggctctgttgctcaggctggggtgtagtggtgcgatttcagggtatgagaaaatgcagctggacctggctctttccaggaagaccctcacagccaaggagtccaaagcctggggttttcatctaattccagtgtgactggggtaggagcagctttggtgctgggtgtgtgtgtgtgtgtgtgtgtgtgtgtgtgtgtctatgcctgtgtctgtttagggtgttaggctcgtggttgtctagatacaaatgtcccagggctcaggagccccagggttatgtcaggggcaccagatgaaggtgtcaacagaagttagggcacaagggacaaaggtgagagcaaggttagattcatttaggtgcaagaaatcatagagggaggagggagaggaagccctcctgctaccaccgaggaagaagcgcagcttaaggcagaaagcctgtccggagaggaagtgagtttgagggcagggctctctgggtaaagtacggtctgggacaccagcctgggggaagggtacagaatgcagagtggcctggcgtggggactaagaacagaggagagcagctttcactgggagggtcagtgttttcagtgtccagcactgagcaaggtgagatttgggcagcttgctgtgaaataaggtcaggctctggcattgtccccattgcgtgtgtgtgtgaggggcactttgggagagtgaactctccacctccatcctctcatacgtccttcaaccgagcttgccagttaccctgattccaaggagatctatttattgttgacaatactggatcctagcagaggctgggtaggagcctgggcacaagcaagtggaggagggggcctgggcctgaaagacctgggaggtttgagagaggacacagcccacagaatggagcagatggggtagagtcggcaagcattcagggctcctagtaagttggacaatggagaccctgaaagatccagtaaaacggggagaacaaacaggtccccaactcacatccttgcagtgcctggagcttcagactccagacaggtggggaaggaaaattgagggatgtgaacatgttggagaatgtcgtgccctgaagaatgaagaaaaggggggtgaggaatgagagcaggaacggcttccagtgcctggtgcccaggagaactcagaaaatgggtgtggtggagaggaatcgaggaaccggaagtggtggaagtgtgcagggcccctccgagatcactgtgactgccaggcgtcctccctggctggagagcttcactgtcctccttcccagccaaaatgtgtcccttgaaagcttcctccccaatggactggttctgggtcctatatatttgaaggggtggcctgcctctccacacctgtgggtatttctagttgggtgggaggagagacagagaaaagaaataagacacagagacaaagtataaagaaacaacagtgggtccaggggaccagcactcagcacaccaagggcctgcaccggcaccggcctctgagtttcctcagtttttattgattattattttcattatttcagcaaaaaggaatgtagtaggagagcagggtgataataaggagaaggtcaatgaaaaacatgtgagcaaaagaatctatatcataattaagttcaagggaaagtactatgcctggacgtgcactcaggccagatttatgtttctctccacccaaacatctcagtggagtaaagaataacaaggcagtattactgcaaacatgtctcacctcccgccacagggcagcttttctcctatctcagagttgaacaaatgtacaattgggttttacaccgagacattcagttctgaggggcaagcaggagacagtggccttcctccatctcgactgcaagaggctttcctcttttactaatccacctcagcacagaccctttatgggtgttgggctgggggacagtcaggtccttctcatcccatgaggccatatttcagactatcacatggggagaaaccttggacaataccccgctttcaagggcagaggtccctgcggctttccacagtgtattgtgcccctggtttattgagactagagaatggcaatgacctttaccaagtatactgcttgtaaatattttgttaacaaggcacatcctgcacagccctaggtcccttaaaccttgatttcatacaacacatgtttttgtgagctccaagttgggtcaaagtggctgggtcaaagtggctggggcaaagctacaaattaacaacatctcagcaaagccattgttcaaagtacaggtctttttcaaaatggagtctcttatgtctttcctttctacatggacacagtgacagtctgatctctctttcctttccctacatatattcatggaccacagtcttcaaggagtccatttcctcactgtttttggtttgatttctctgaaattaggaaatgccccattgaggcacccaggattgtctttacttcccccagagcttccactcctgaggcaggagcttctcaaacaccccccaagactcaacacctaatttcaccctctgaaaccttcccatttcttaaatccaggcagggtcatggtccttagcccctcagatgctgtggagaccttctttccctttcatacattctctcaagattaaaagccacccctcctcagcacacaccccagagactcaccccaacatgcattgcaaatcaccctggaaacagtcataagaccacactcatttaataatattttatttatcaaaagacactctttctcaggtaagtgaagttctggagaggaaaagaggagtcctgatgtaaattgccctgcaggccttgctgagatcacaaggagattgttactgcagcttgtagcacaatagtaaatttcttctctggatggaagttcaacaatccagatcgtagtatattccttttcattatgctcagtccagcaaatgtgatgataacaaattccttttcatgatcatccattcagcagagaaaatgtttgtaaatgtgttttcatgaagatgtttaccataacatacaggatttaccattatcaatgcatccacaaactctgctgttgttttttatacataattttttccatcgagaagtgatagttgtacatattcatgctgttcatatttcaaccacaaactctgctggtttttttatacgtaattttttccattgagaagtgatacttgtacatatttgtgctgttcatatttcatgtttcatcatccttttacaataaataggttatattgtattttaagtttttctaactgtagtgcagaaattgtactgggtgtatacatagatatcaaaccaaatttacttgttctggctgataatgcatcatttatttcatagattatgtatttctttgacacatttcacgtacaactaattgcataaaaatgaattttcttttagtatagacatcagcatgtgcttaattcggaatttaattgttgagttaaacatcgtcattgccttttccgttgttattaattgctctggtgggaattttgttatctcatacataagacagtgtgccacaatatctcttaaaatttcaatggcaataaactttatatttaaaaacagggaatctatggaaaacacatttttttctaaaggattaaaatatttttttaaaataattttctaaaaagttaggcacggtagcaaacgtctagagtcccagctactcaggaggctgagacaggaggattgcttaagcctacgagttgggggctgcagtgaactgtgattgcaccactacattccagccagggcaatagaagttaaccctttttctaaaaaaaaaaaaaaaagaaagaaagaaagaaaaaaagcaacaacaccaaaacctcaccaacaaaatggtaaagaaaaaaaaaacagcaatacaatgtaagctatttgatccaaagaagtcaatgaaatttaaaacaaatgaaagggaaaaagtaatacttgagtcctgcaggactcagtccaagttctgctgtgcctccctcacggtgagccacccctttagaagtcacttgggtcataagttaacccgataggaagtgtcctggccaatgaactagggaggtggtaaatggcaccattttaaatttaaattcacggccttttcaacggatcagtagccatgttgggtaagagtgcaaatgtcagaggtgaaaagaggcagcaggaccctcccctagtgcttgggcaacagaaggtggaatcactaaggggacaagactttagcatgctcaagtacacaggacagaaaacatgctttttacaaaagctggtaaatatgaagagggaacattttcaagttcctgtaaccaagaactaccgcctgtaaccggtgaaagtgactttctatggcaaaagcgtttttgaaaaggtgaggaagttaaatatcttaatgttgggaggttcttctggtttatctggctagaccctaatggaatcccaagtgtccttatggagcggggagcagagagagagatttgagtccagacgaggaagaaggtgatgtgagtctgggtgcgggacagggggagaatgatgctatgtggggatctgggctggggaatgacttagctgcatgagcggagtgacttagactcctgaactagaagaaatctagggctcatcacctcagcagccctaaccatcaaccttatttttattacaggtcttccatcgacggactccctaaaaagccagcggcgtggaggggcgccctctattggacaaatagatcttgactactttcggccctcaaatagcctgactaggcaaataacaaataataataatttttttttaaatcatggaaaatattttaaaaaacaattaaaaagttataaatctataaaatctgcttctgtctgtgtgtctgtatatttagatgtctcatgtgtacataatgtttcactaccaaaatatatgatgaaaccctcattaatcggcttagaaaactaaacacctaaatattttctcagaaaatacaaaaactttaactcaaatcccttttaattcacctgactttaaaaatctttaaaaaataaagcatgctttaaaattattagtaaagtaaaattagaacatcttcagaatttagacatttggtttaaattatacaggtcaaatactgcccttagtaaatattttcaggtcataaacaactcctgtaatcttttaaataattgaattacatgtctgttttagagctttaagttctagctaaagcctggggacaaatgaagggcaccatgccccctctctgtgctggaaagagacattttctacagctctgacccttgcagtaggctttgcaactgctacctatcaaaattgcctacatcctaagtttattattaaaaggagttgcttggagttaacattataatgaatatatgtaactaaaactatttctcatacaaagtatatgaaaaagtagaatgtatttttaataaaaagttataaaaagacatgaacatgtagtttttataaaaaacagtaattttgtctagttttgcagttctaaaaagttatgttaaattcaaaaataaaaaataacaagacaagactcaaggtttaaataagttgtaaaagatttgtaaaaattagttctataaaaattttacaaaaaaaagcattggttaaaatttaaggaattattttgtttttacagaaattaaacattcattaaaaacactctgatacaaggccttaatttgggttcatgtatcagaatagcagggttttcttagaatattaatctattctttaaaagaactatgaatgttatgcaaactttataaaaatcttaccttagagtcaaactgattaaaattccatagattttacgtaaaattttattaaaaattaacttcaacaaaaataaaatttgattttctcctttaaacaaaagttttgcgtaatattaaataataaagcatttttgtttaccttttaaactataaacacacacacacatacacatacaccaacactaaagtcagctgacctcatactgtctttattggatattcttgtttaaaaaactatcttctttggaaaataaagttttttattttaaaccatattttaaattatcattttgactaaatccataacatacagtgatctgtaataattctattttataatatcaagtgttttgaagaactccaggaacagccatgagagaacactgtggtttagtaacactttatttcctcagtttgaaaatagttgtctttcttggggaggccggtttcagcagatgaaaacaagagtcatgatgaaaattacccagcagtggttagtgtgaccataggaacattgtcatcaggtcagcagaaaacatatcagcaaatttttctcatactggcagtgtgtaggggtggatgtttacagttcctgaagccccagtggtcgtgtggtcttttagttttgccatttataggcaacttgtggtaactagctcaattagacacattccttatcacaaggacagagggctttctgtatcctagggttcttgccttggcattccagaagaatcaggtcacacgtggacgtggagaatgagtgcaaggttttattgagtggaagtagctctcagcagatgggggagccagaaaggagattggtttctccctggattggggccgttcagcagccctggctctcctctgactgccccaggcaaaatccacatcgttctataagtcggtgccctgctggtgtgctggtgcctgttgtcatgttcctcttcatgtccagccgcctgtgtgttcctccgctgatgtgctcctctcgacgtcaagcctcctgtgtgtctgactgctagggtcttggggtttttataagcacaggatgggtcttagcaggccaggatgatcttgggaaagacaacattcggtcaggaaaacaaaaatgcctgttgtcatctaggtccgtggggacaagcccaggtgtggagcttttagccagggaccacagcctcctgtatccaacacttcccttcaccttttctatatcattcaaagggatcatgcccttcccatcccagcacttcactttcatgtcatttgccccctctgaagaggtacatctaactgccattagaatatggatgatgaccagtcttagctgcttcctgctgaaagggggcattgttttgggggaaaacggcagtcagattcctcccaggggtctctataataaaagatcgaggtggctactttcaggaggtcctctaatgtactatctggtcccaagtcccatttctgcaacctcctcctgatgtcaggagctgcctgagtaataattttatcctttaggattatctgtccctcgattgaattaggagatagagaggtgtgatttaccaaggcctctcttagcctctccaggaaggcagtgggattttcatcaaatccctggttaattatggacaacttagtataattgagaggcttggtcttagacctacgtaagccctctattatgcacacctgaaagtgtctcctcttccagtcttccatctcattattgggatcccatttagggtccttcactggtgctacttctcttccagttggataatattcgctcccttccctgatgctataggtgatgcaaagctcatccccaaatctctctgctgctggcagagcagcctgcttctcagtgtctatcaggttctgactcaaaagtaacataacgtctctccaggagagttcaaatgttagggtgaaattctggaaagcttctatatatctatcagggtcatctgaacacttgcccagatctcccttaatttgctttaagtcttgtagggaaaagaggacttggaccttactgggcccaaattcactgggcatctgtaggaggggcaagagtgagactgggcttgtttgggatgaagatttctaggaggggccaggtgagaggctgaagctggatacggaggttggggtggacccagaggagcagggcttgagggagctggcacgtcagctgggggtgcgtctgggactcgtgtctttaattccctgggcttgaccctggcagccttccccgagacagcaaacaggagggctggaacaatcctacatgtcagcaaaggtctggattgctttgcaaggtatagaaagcctgcacatttggggcctcagaccatgtgtcctcacatccagagaaaagttctaattgcaggatggtattgaaatgaatggtcccttcctgaagccaagccagtccttcctgtaaaccataatttggccaaacctatgtgcggagggctatgagatgcttttcctctggattctgagggtcaaaacagtcccaatggttcaggatacactcaaggggagtacaagctgggggtggtgaggagaactggctgcccattctgaaagacagggaatagaggtgttcctcatttcccttccttcttttggcaaaaagctcagggtgtgatggggagggaaagcaagcatcttcacttcactttccacctcttacccctgcgccctggcaaccttggcaggtgccggccacaggtacaaatgcggtatgtacccatgaagcagggagaacctggagattaggaattaactgccctcacctatgtttccttttctccctgctgttgaaaaactttgagttccctgggcctttttatcccatgaggcatggcctccttctgtgggatggggttcagtcagcaggaattggtcctgtccatttacattgtgcctgttgcctggctttgaattcctcagacctgctttctctttctagggcctcagcctgaagcttggaattgagtttgggactgaaaaagcatttcagaggctgtttatatccatttagtgcctcaaataagccctgctgaatttgcaattatcagccagcaggggtcactcctctgttaacttccctattagaaacagagcggtggggattctcacttagaaaagaaaaaaagagaaaaacagttaaagaggcaaaaagtggggaatgctgggggaagaaccccttgcttagtgcaagtgggcccctctaatccttataactttcccatccttcccccagttcagaccaggttgaattccttggccatggaaggaaaggttccattgatgcagtgggtgagaagcactctgtagggtcctggctaccatcggttttctcacacccccctcatcccaggcagtggagggagacacttctgcgacattgctccccctgccccttcatggctattgggtgtggcctttgcctgctgcaggcatgcctaggtgctggagctgggagggaaaagggtaaggagaggtgccctggaagccgctcatgcctggggctgtcaaggtggaggcatacatggcacctctaggaaaaattggtctgatttgcacctttggcggctgagccaaatgctcattttacttagtaacattgcctcagcctgtagcaaaactcttaacattataaaggaagagataagatccatttcaaataatgtgtgagagagaaaagagatgaaaggaaaacagagtcttttacctgcaggaaagggagagaagtggcagagttttggaagaaaggcaggcccaacagtttcccattcactcacactcaccttccgagatcccagacgagccaccagttgaaatgggaaaagtttccttgtccccctcacaggaggtggagtgggggtgtggcttgcttctttagtactccgctgctcaaacctctagggaagcatacagactggcaagttgtggggctacaaccccatggcagcatctaggggtagatgtttacagctgctgaagccccagtggacatgtggtaccatgtgctcttttagttttgccatctataggtggctttgtggtaaccagctcaattagacccattccttaacccaaagacagagggctttctgtatcccgcggttgttacctaggtgtaccagaaaaatcaaatcacacgtggtcttggagaatgagtgcaaggttttattgagtggaagtagctctcagcagatgggggagccaaaagggagaatagttttcccctgaagtcgggttattcagcggcccaggctctcctctggctgccccagccaaactctatgtcaatccattggtcggtggcctgccagagtgctggtgcctgttggtggattcctctcagcgtcgagagtttttccctctcaggaaagggagagaagtggcagccacccatgtgttcttgcactgatgtgctcctctcgacgtccaacctcctgtgtgtctgcctgctagggtcccagagtttttttaggcacaggatagggcatggtgggccagggtgatcttgggaaatgcaacatttggtcaggaaaacaaaaatgcctgtcctcatctaggtccaggggcacaagcccaggtttggagccctagccagggaccccggcctcctctacccatcactttccttcaccttttctgtatcattcaaagggaccatgcccttcccttcccagcacttctcttctgtatcaataggtgatgtttttaaaatttcccaactctagtgcaggcatggtactagacatatacatagaaataaaaccacacttattcttctggctggcaagacatagtatttttgccaaattatgtgttgttttgaagcattttatgtacccctggtcatataaaaataaagctattttgttcagtacaaacagcagcattttctggattagaaagttaatcatcttaaaagatcatcacggatttttccattgcactcatcactaattgctttggcaaaaaatttcttatctcacgcatgacaaaatcagccgcagtatctcctagtaatttaatggtgatgatctttataaaggaaataagcacatcaagggaaaacataattttttttaaaaaaagagtaataaaactttttaaaagtcttttttaaaagactgcttttctaaaatagtaaaataaaactccaccaataaaaccaccaacaaaacagaaaagaaaaaataatgatatgatcggagctatttgatgaaagatggtaaattaaatttaaaatgattagaagagaaaaagcaatacctgtctcccgtaggtctcagtccaggttctgctatgcctttctcctggtgagccacctatttaagagtcgcttaaagcatatgttaatccaacaacagcagattaaaaaccaatgcaatctgaactatttgatctaaaaacataaataaaatttaaaacaaataaaagagaaaaagcagtacctgtgtcctgtaggtctcagtccaagatctgctctgactcccttgtggtgagttagccctttagaagtcacttggggtggggcatatgttaattccactaacattggttctggccaatgagtcaggaaggtggtaaatggcaccttttcttcttgctgatttctttcagttcctttggagtctggacattagtcctttgtcagatgcctagtttgtgactactgtttcctatactgtgggttgtgtgtttaccctgctgatatttcttctgccttgcagaagattttcggtttcattaggtcctattgatcttattctatttttatatttttgcgtttgcttttggggcattagtcatgactacttggcctaagccaatgtctagaaaagctttttggatgctatcttgtagcatttttagactttcaggtcttagatggaagtttttatatgctttgttaaagatcaggtgactgaaagtaccgggctttgtttctcggttctctattctgttccattgctctatgtgcctatttttatacttcctgcaccatttattgaataaagtgtcctttccccaattagtgtttttgcatactttgttgaagattagttgtctgtaagcatttggctttatttctgggttctctattctgttccattgctctatgtgcctatttttatacttcctgcaccatttattgaataaagtatcctttccccaattaatgtttttgtgtactttgttgaagattagttgtctgtaagcatttggctttatttctgggttctctattctgttctattgctctatgtgcatattttataccagtatcatgctattttggtgattgtagccttgtagtataatttaaagcctgccttcagatttgttctttttgcaaagtattgctttggatatgcggtcacgtttttggttttgtataaattttaggattcttttttctagttctgggaaggagaatgatgatattttgatgagaattctactgctctgtagatggctttggagagtatggtcactttcacaatattgattctacctattcataagcttataatgtgttcccatttgtttgtgtcaactgtgatttctttcagcactattttgtagttttccttgtaggaaacttacattaacctacttggttaagtatatttctaagtattttacttattaaaaattctcagggaaatgcaaagtaaaactgaggtgggaaattaaagaaaaataaaattaaaaagaaagggaaataagctttcttgtattaagctaacttgtcccagaggcagcaacaggcacagcccagacccaggaaaagtcttgataatattatttattgtattctggagactcttccagcactccttcaatgtagggagaagaaaaacaaattttcctttgttttatggtatgagtttatagattcttgttctctttaactagtaacttcaagtattctgttttatctaagaagtatggcaaaggtcatgagaagcctgagcaggcctgaactacagctctctaggcaccatagtgaagataaaccaatgcaagcctctttagagcaaaacctagataatagacatctgggttgcatagcaacagttatgtgcaatcctgagttatgaacctgttacaatttgattaactgtctttttcctgcctctgtatccctgctttcacaccactgtaagcttgcttcaagctggcccacccccttttgtgaagtgtgtataaaagtcaagtgctgtctttgttccaggccctgtctttggacgtgagtctgctgggcctgagagcactcaataaaagattctcctgttttaacccaaagcctctctctcatcctcctaaatcccacaacaaaaccacaatgagatgctatcttaatcttgctagaagcccataatttaaaagtcagaaaacaatagatgttggcatagatgtggtcaaaagggagcactttgacactgctagtgggaatttaaactagtccgaccactatggtaaacagtatggggattccttaaagaactaaaagtagaccattcattccagcaatcccattactggctatctacccaaaggaaaagaagttattccataaaaaagacacaagaatatggatgtttatagcagccgattcgcaattgcagtgatatgggaccaacttaagtgcccatcaacgaacgagtggataaagcaaatgtggtacaccatggaataatacttgataataaaaaggaacaaaataatgtcctttgcaacaagttggatggaactggaagccattattctaagtgaagtaactgaggaatggcaaatcaaatattgaatgttttcacttttaaatgagagttaagctatgagaatgcaaaggcataagaatgatataatggacttggggactcagggggaaaggttgggagggggatgaggaataaatgatgacatattgggtatattatacactgctcaggagacagatgcctcaaaatctcagaaattaccactaaggaacttttatccacataaccaaaaaccacatatattccacacactattgaaagaaacataaacattattttaaaaaataaagccacttttaaaattagcaaaataaaataaatatgtcttcagagtttagatattggatccaaattagacagatcaaatactgcctttactaaatattttcatgtcattaacaacttctaaaacctttcaaacagttttttgacatgtcttggaaccatccatttctagctaaggcctgggcacctgtgaaatagggccatgcccccccttatactgggaagagtaagatatttcaagactaagatgttttctacagctccatctttttctttaagctctacatcaaggacataattaaaattggttgtctcctaagtggtttactaaaaatgcatacttaagagttaccattataattaatatttgtatctaaagctacttaaaaattttcacacacaaatctgactgaacaagtaaaatatattttaagtcaaagtttataaaaggacatgagaacatagcttttatgaaaaaattagttttgtcaagtttagaggttttcaaatattttaaattcaggaaataaaataacaaaaagacaaaagaaaatggttgaacaacttagaaaaggtttgttaaaattcatcttataaaacaatctacatgtaaaaagtgggctaaaatttgaaagagattatttaggttttccataaattaatccagaaggggtaggaagtcttaagaatgaggaaggacaggaggaaggggaggtcatcctgacactgcagaggcagaagtgcagctgaaggtatgaaggctaagaggggaggggagtttgagtgctgctgcctggctgtcagagcagaggagggtcctgggcaccagacttgaggaagggatgaaaatgctgggcagacctgtagtgggcccttgagatggcagatagtggtttccagagagagggccattgttttccagtgcccagcactgagcagagagagttttgggcagtgtaaaaaaaaaaagagaacttacctctttctcgttttagaaaaagaacagtctaagaatatcagcagggaaactctcagtgcttcaaggggttaaacgcccttttggctttcttgtgttggtttcatcatagaggaggagaaacttcttggaagtgttcctaaaaacacaacacgtctgcttctcctttcaaaaaaggaagtgctaaaacacgaacactctagatccaaatattaatacggatgtctaaatgcttccgttttccaaggggcagaaagctaaaggttgtaacctattcatttcagtcaaagttggtgaaagggaagcaaaggaactgggtggggcttggaaggatgacgaagctcaagctcattggccagcaacctctctcctgggggcgggaggggtgagcatacgtcattgctttggcttctataaaatgaggaggactcaccgagtgtgaagagtccttctggtgattgcagctgagagcacactcacgacgttctgcaaggattctctgattatgattctgaagggaaaagcgatggaatggacagcagagattgtaattttctttatcttgaattacggaagaaagtatctaggacagaaatccacgacaagtccttggaaccagcagatctcttcgttcacggagacgttgacgtattctctattgaagaagattcttaccttcttactggacaaggttttgtcagttctgcgtgactggattgtccgggagactctgaggaaactgatgtcacatgtttttccaaagaagatgtttctggaaccaacaactgtgattgtggtttgaggacttctgagagttccagtacaggaaataagcagaacatcagctggaggctaaacggatccagacttcactcttcacttcccttcctattcagtctattgtgcctgctgactgagaagcttggctggtatgtgagcaaataaacggaactattcagaaggagatgttgacatattctgtattgaagaagatccttatcttctcacctgacaaggttttgtcagttctgtgtgactggattgtccggaagactctgaggaaactgatgtcacatgtttttccaaagaagatgtttctggaaccaacaactgtgattgtggtttgaggacgcctgggagttccggtatgcgaaataagcagaacatcagctggcggctgaagggatgcagcctccactcttcacttcccttgccattccatctattgtgtctgcctgactgagaagcttggctggtatgtgaggaaataaacggaattataaacaaggagattgtttctcatctacttcattctgttgtggcttttctattttggggttcagggtgtgtgacaaggaccaaggagatgaaaggtttcatgatggagaaagcccaggcaatcagattgaagagctatccacagggaatcttggctgctgaggggctgcaccctgcaacggactgaccatatgacagaaaagggttttaaaggctcaacttctggactgagaacccagagtaatttgggaacctcctctgtgaggagatatgaaagctgggaatcatgacatccctaggaatggaaggcacatttcctgatggaaggggtgctttggaaaacaggagcagagtagacacagcagccttgtggatacgggtgggcagcatgcatgggtgatgtgaacgtggagtgtttgtgatcgaaactcaaaatgtctgacaaagtgaaaacctagaaaccacaatgaggaggaagagtttgtgagggcaatcactctccccatgtgtgaaaatcgggggctcttaaaatctcatctggagaggtgcagtctaccaaactctgggactttagcctccccttttaaaaaaccgtgcatcaataccaacgtccgaaaccacagaaataacacctggcttgcatggagacaaggacaaaaagccgtcatgatgagttgttctgctcacttgctgcctctgttcagtgcacaggatattgtccacccactagcaggctactgcaagagaagtgtgcaatatgttccctatgtgccatatatgtgccatatggcccatatgacaactgagtcagaaaatatctgatgccctcagagttacactccacctggagcttgcccccagccatccaggacctaggctccctaccctgtccaattttctggtgttttgggggcttcattctctaaggtgtgcccactctttactcaaaccaaaacacccacatattcctgcccatgaacaaccaatcaaccacttctcagttccacatcctgctgttgggtctctagtggtgacactgtaactcccaggtcatagtggtgacactataacacctagctaaattgatgccttgtctctaggaggccatgggctcctgcaggtctcatctgactctctgtagccttccctgacaatgctcacaatacccaagccagagccacattgacagcaagctgctctcatcttacctttgccagacctggccactggaaaaggctgaccctcatcctgcaatgcctatacctccaacctttgtctcaagctggtgtcctggagggacttctaagcagaaaacagattcagactcccatcctctcctgaatggcctcatatccaattctcagaccctcagccttcattgtaaggacacttcatccatgcccttgagtattctgtctgcactgtgtattctgcaatagattctcctccctctgcgaccctcaactccttccgcagactttttgttttcttgatcatctaccatagtcttccactgggacactgccaagcccattctggagagtgagttgtgcaagtacactgccccccatctacctttcgggaggtgtatacacccttctttctcccaggtctggaggctttctattttcatcctgaggcatctccacctgctcttggattcttcaaattgacaaccaccagttaacaagaactatgtgtcaccaaatagccaaacaatggcaattacaaaaataaaattaatagctgtaacccccattagcaaggatacacaaatcaaatcagggatagtgggtgaggaagtctgcctaacattcaaggaaggattctgaagtgatacaaaatcattgcctttgctatctttagaatggacactttcagccaggcacagttgctcagcctgtaatcccagcactctgagagccccagttgggtggatcacttgaggccagcagcttgagaccaccctgggcaatgtgcagaaaccccaactctactaaaaatacaaaaatagccagttattgtggcacatgcctgtaatcccaactccttgggaggctgaggcacaagaatcacttgaatctgggagccagagtttgtaatgagcgaagatcatgccactgcactctagcctaggcattagagtgataatctgtctgtggaaaataaaaacattcctcttcaaagttttcttctttaaatcataaatgttggaattaatatatcctctttgaaactcactttcttcaagcttctttatttgatggtagtaaatctttgttaagctttatgaggcaagagtaatggaagaagcatattatatatatttatactctaacctcagtgcttgttctagcaagctcaggcatgcgtgaatgtgcccaggcatgttccagcccataccttatatcctttccttattgggaaatgctgttactcctataagcattcttgtaagcaacttcctctttttctttgtctccactatctttacctattgaggacagttttaggttcttagccagttggatgtagcatagactgtgaggtccaaccccagccaatggagatagcacacagcagtagcgacctcatgcttaacagataaatattcctgtctccctttgtttggggtgctctcagctgatgagcaacaccctttctaaagaaattaaagttgtcttgctgagaaaacttttggtctaaatgctgattcttccttgcagcactgaagaagaagcaattatttccaacactttctcatacacaaaaaaagaagaaggtggaagaaaactttcttgtgcaccctatccctcactcagaaagacaacagaaggctcctagtggcaagccctagaggattcatttcttttgggaaccctcttggctgggatactaggactcaggtcaaactcagcattttcagtgtgtgggaagtgtgcttgggtttcactgttacttccaataatgtgatttggtccttggggttcaccaaattttggtatggagtggtgaaccctgttaagtttaagtgtctataaaattaacaaagcaaaataaccattctgccccatggttcagagaccaaatattgtgtaggaaatgctttagcgagagaaacagagaagaataaaaaatgtcctcaagcgctgcattatttcttgttatcgtccagatcttagaggaaaggctttcattttccctcattcagtatgatattagctgtgcatctgtcatttatggcttttattatgttggggtatgttccctgtgtatgtagttttttcagggtttttgttatgaagtgatgttgaactttatcaaacgtttttcagtttcagttgaaacgatcatatgctttttgtccttcattctcttgatatgatgcatcatgttgatgatttccatatggtgcactgtccttgcatcctgggcatgaattccacttgatcatgacaaatgaatttttaatgcattcttgaattccgtttgctggtattttgttgaggatttttgcatcaatattcatcagagatattggcctgcagtttctttttttttcttttttctttgttttgttgtttgtttgtttgtttgttttgatgtgtctatgtctggttttggtatctgggtagtagtgttccatccccttttattttttagaataatttgaataagactggtgttggttctttaaatatttggtagaattccgaagtgaagtcattgggccccgggcttttctttagtggaaggctgtttattatggcttcaatctcgttacttattattggtctattcatgttttgaatttgttccttatttaatcttggtaggctgtgtgtatctaggaatttgtccatttcttttagattttcaaatttattggcacataattgcccattgtagcctctaatcgtcatttgagttcctgcagtaccaattataatgtctccttcttcatttttgattgtatttatttggatcctgcccctttttttcttacttaggctgcctaataatttcttaattttgttgaactttttcttttgtttgtctcgctctgccaccaggctggagtgtagtggtgtgatcttggctcactggaacctccgtctcccaggttcaagcaattctcctgcctcaccctcccaaatagctgggactacaggcaagtgccaccactcccagctaatttttgtatttttagtagacacgggttttcaccatgttggccaggatggtctcgatctcttgacttcataatccacctgcctcagcctcccaaagtgctgggattacaggcatgagccactgcgcccagcctaattttgtttaaattttcaagaaatcaacttcttctttcattgatttctgtattttttatttccattttatttatttaaactctaagctttattctatcttcttctcattttagctttggtatgcttattgcctctctagctctttaatgtgcattgttagattgtttatttgaagttcttcctctctacaccataagacgtaagcatgtcctcattatgtcataagatgtaaccacttacagctataaacttccttcttagttctgcttttgctgtatctcataggctttgttatgttgtgtttccattatcaattgtgtcagaaatttttcaatatttttcttaatttcttcattgagcaactgatcatttgggagcatatttttaaacttccatgtacttacatagtttccaaaatacctcttgtgatcaatttctagttttattccactatggttcaagaagatgcttgatattatttcaattttttttcacattttaagatgtgttttgtgacctaacatatggtctactttttttttttattaaactttaagttgtggggtacatgtgtagaccgtgcagttttgttacataggtatacacgtgccatggtggtttgctgctcccattaacctgtcatctacattaggtacttctcataatgctatccctcccctaacctccaccctctgacaggacctggtgtgtgatgttcccctccctgtgtccatgtgatctatttttgagaatgatccatgtggattagaatgctgtggaaaagactttggattcctaatatccagggagggagacgatgatattactttcaatatcacacgggtgtacacactctctgtgacattgttcctaatatccagtggaagagaggatgatataacacccagggagggagaggatgatattactcttaatattgcagggtgtgtacccatgcctatgatattgttcctaatatcaggagggggagaggatgatattactcagaatatggcagggggtgtacacacactctgtgacatggttcttaatatacaggggagaatgggacaatattactctcaatatcgcagggggcgtacaaccctgtgatttgttcctaatatacaaaaggggacagtatgatattgttcctaaaatcgcagaaggtgtacaacgccctgtgatattgttcctaatatccagggcgggagaggatgatattacccccaatatcacagggggtgtgcactttccctgttacattgttcctatgatccgagtggggggaaatgacattagtcccaatatcgcaggatgtgtacactactcccccatgatattgttcctaatatcaagggggagagaggaggatattactcccaatatcgcaagggaggtacatcctccatgcaatattgttcgtaatattcaggaggagagaggaagatattactctcaatatcgcagaaagtggacacccaccctgtgatgttcttcataatatccagggaagcagacgattatatgactttcaatatcgctgggagtgtacatcccttttgggatattgtttctaatatccaggaagggagaggattatattacttccagtattgcagccagtgtacacatttcttgtgatattgttcctaatatccagaaagggaaaggatgatattactcccaatattgcaggtggtgtacacccccctctgatattgttccttacatcaaggaaaagaaagaagaatattactcccaatatcgaagagagtgtacacccctcctgtgatattgtatttaatatccatggggaaagaggatgttgttactcccaatatcgcagggggtttacacccacactgtgatattgttcctaaaatccagtgaaggagaaaataatattgctcccaatattgcagggtgtatacaggccctcccccgttatattgctcctaatatccagcggtggagaggatattactttcaatttttgcagggagtgtgtaccccctctctgatatttttctaatatcaaggatgggaaaggatgccattactcccaatatcgcaggaggtgtacatgccctgtgatattgttcctaatatccagggaggtagaggatgatattactttcaatattgcaggggctgtacaccctctatgatgttgttattaatatttaggttgggagaaaatgatatttttcctaatatcctgggaaggaaaggatgatattactgtaaatattccagggagtgtacaccttcctaatattctaatattgttcctaatatccaggggtgggagaggattatattactcccaatatcgcagtgggtgtacacccctcctgtgatgttgtttctaatatccaagcgaggagaaaatgatatcactctcaataccgcagggggtgtacaccttccccatcatatcgttcctaatattcagagggaaagaagatgatgttactttcaatatcgcaggggttgtacacaacccctgtgatatttctcctaatatccaggaagaaagaggatgatattgctcccattatagcagacggtatacgcctccctgtaacattgtttctaatatcaagactgggagaggatgatatcacttccagtatcgcaaggggtgtacacctcccccgtgatattgttactaatatccagggggaagaggataatattactttcaatattgcaggggctgtacacccccgtgatattgttgttaatatttaggttgggagaaaatgatattagtccaaatatcgcagagagtgtacacacttccgataatattgttcttaatatccatgggggagacgatgatattacacccaatatcgcagggggtgtagtctccccttgtgatattgtccctaatattcagggaagtaaacgatgatgttagtgtgaatattccagggagtgtacaccccctttgtgatattgtcctaatatccgcaggagagaagataatattactcccaatatcgcagggggtgaacacaccccctgtgatattgtttctaatatccaagcgaggagaaaataatattactcccaatgtctcaggggatatacaccttccctatgatattgtttctaatattcaggtggaaaacgggtgatattactcctaatatccaggaagaaaggggattatgttactccccttatagcagggggtatacacctcccctgtaatattgttcctaatatcaaggctgggatatacgtggggggaaggatgatattactcccaatatcacaggggttataaaaccttctgtgatattgctcctaataaccatggcggaagaagatgatattactcctaatattgcaggaggtgtacactcccccattatgttgttcctagtatgcagaaaaggagaggatgacattattgccaatatcgcagggtgtgtacaccacccatgatattgttcctaatatttagagggacagaggatgatattactcccaatatcgcagggggtgtacacgcatcccctgtgatattgttcttgaaatcgaggggaaagagaattatatttctctaaatattgcagagggtgtacaccgccccctgtgatattgttcctaatagccgggggcggggggagataattaaattactttcaatatctcagagagtgtacatcccccttgtgacattgttcctaatatccagagcaaaagagaatgatattcctcccagtatcgcaggaagtgtacatttaacctgtaatattgtttctaatatccagggggaagagaatagtaatactcccaatatcgtaggggttgtacaccttttctgtgatattgttgcaaatatttagaagagagagagaatattactcgcaatatcacagggaatgtatacttcccctgtgatattgttctaatatctagaaaaagagaggataatattactcctaatattgcagggggtgtacacccccacttgtgatattgttcctaatataaaggaaggtcgaaaaacaaacggggagcccagggggaaggaaggcaggcgaggaagaggcagcgccggggcgccggagggagcagccgggccgcggaagcgcgagcacgagaccggtcgcggtcgcagtcgcatttttgccgttgtcgcggccgccgccgccgaggcttacccggggatgtctgagcccgcgcctcgcggcccccaagctccacgctgcgcccgctgtcccggcctctaagggccgccacgtccctgcggcgcgcgcaggcagaaagcggcttcgtgccggcggagggggcccgggcgggccgggaaaggctgccccaggccccgcgcctaccccatcaccgcggccggcgccgggccgggaggatgagcggtgtggggctctgaagcatggagggggttttgtacaagtggaccaactatctcacaggttggcagcctcgttggtttgttttagataatggaatcttatcctattatgattcacaagatgatgtttgcaaagggagcaaaggaagcataaagatggcagtttgtgaaattaaaggtgacagctttggaggggaccacccttgattggatacataaattctgttcattcagcagacaacacaagaatggaattaatcattcctggagagcagcatttctacatgaaggcagtgaacgcagctgaaagacagaggtggctggtcgctctggggagctccaaagcatgtttgactgatacaaggactaaaaacgaaaaagaaagaagtgaaaccagtgaatcgctgaaaaccaaaatgtctgaacttcgcctctactgtgacctcttaatgcagcaagttcatacgatacaggaatttgttcaccacgatgagaatcattcatctcctagtgcagagaacatcaatgaagcctcttctctgcttagtgccacgtgtaacacgttcatcacaacgcttgaggaatgtgtgaagatagccaatgccaggtttaaacctgagatgtttcaacggcaccatccggatcccttagtttctcctgtgtcaccttctcctgttcaaatgaggaagcgttctgtcagccaccctggttcttgcaccagggaggagtagccactgtataaaagaaccagtatctgcacttcaccgactctcccagcgacgccgaagaacctactcagatacagattcttgtagtgatattcctcttgaagacccagatagacctgttcactgttcaaaaaatacacttaatggagatttggcatcagcaaccattcctgaagaaagcagacttatggccaaaaaacaatctgaatcagaagatactcttccatccttctcttcctgaagaaactgtagtgtccaactttctctaagtattgctatgcaaaagctgctgtaattgaactattgttatagggagtagttttttcccttaggactctgcactttatagaatattgtaaaacagacaaacaagaaaacaaaccacatacttttgaagcgtgttttatctttatatagtttgtttgcaagagtattttcctaataacttcacagtatgaatgtgcatcttttttttctttttttaacaaatgatggtgtaacattttgacatccataaggacaaatgtagatatttttctaaaaaaccgtgaggggactgacagcttggtcagggtgtattgtagcttataaacatgaaatcttacaaggtttcagtttgacagaagtgtgatatatgtaacttgtgccatggaccaaatggtcactttaccacagctaaaaatgagttatgatagcagcttgatggtgattgcattgtattcctttaatcaaaaaggaaacgcaatattctaagtatctttagcccaaataccatgacatattgagcatctttaaataaccagactgtattgtccttcatatgtgaagttgacactactgatttgtcaataccaaattttgggttaaagtgtttaatttttatttatttattttcttgttgcctcaaaagatgattgcattctaacttttgtgacctaccaaatttaagatgtgtatacattgttctttacgttgttctagaaaagagattttaatgctgtagtgacttagctcacttacatcagagaaataaacaactttcaatggaaaaaaatatatataaaggaaggaagaggatgatattacttctcatatagaaggggttgtacaccccccttgtgatattgttcctaatattcagggagggagaggattatattactcccaatatagcagggagtgtacacccccccccccgtgataatgttcctaatattcagggaagcagaggatgatattactttcaatatcacagggggtgtgctgtccccctgttatattgttcttaatattcaggggggagaggatattattatgcccgatatcacaggagaagtacaccccacaagtgatattgttcctaatatccaggggtaaagaggatgatatcgcaggtggtgtacacccctccccgtgatattgtttctaatataaagaaggagagagcatgatattactcccaatatcgctggaggtctacaccccccttgtgatactgttcctaatatccaggaagggaaacaatgatattgctgtgaatattccagggggtgtacacccctttgtaatattgttcctcatatccagggggtagagaggatgatattactcccaatatcgcagggggtgcacggccccactgtgatattgtttttcatatccaggaggggagaggatgacattactctcaatatggcagggggcgaacaccccctgtgatattgtgctagttaggttgggagaaaatgatattactcccaatatcgcagggggtgtacaccgctcctgtgatattgttcctaatatccatgacgggagaggatattactcccaatatcgcagggggtgtacctctcccctgtgggattgttcacagtatccaaaagggaagaggatgatgttactcccaatatcacagggagtgtacaccaccattgtgatattgttcctaatagccagggaagaaaacgatgatattattgtgaatattacagggggtgtacacaccccctgtgatatggtttttaatatacaggttggaaaaggatgatattactcccaatatcacaaaaggtgtacacacccccccatgatattgttcttaatacttcggtggggagaaaatgatattagtctccatatcacaggggtgtgaactcctccggtgatattgtttttaatatcaagaggggaggagatgatattgctttcaatatcgctgggggtgtacatccctcctgtgatattgttccttatatccaggcgaggggaaaataatattactcccaatagtacacaccccatgtggtattgttcctaatactcagggggaaagaagataatattactttcaatatcacagggtttgtacacctttcctgtggtatagttttcaatatccagggggaaggtacatgatattactcccattgcagcaaggggtgtacacacctcctgtgatattgttcctaatatccagaagtggtgaggatgatattactcccagggggtgtacaccccacctatgatattgtttctaatatccaggggaaaagagtgtgatattatgcccaatatcgcagagggtgtacacttatcctgggatattgtttctagtatttggggagggaggagaggatgctattattctcaatatcgcagaaattgtacacccccgctgtgatattcttcataataatcagggaaaaagaggatgatattactaccaatattgcagggggttacacttcccctttggtagtgttcctaatatccaggaagaaagaggatgatattaatcccattttccaggaagtgtacacccaccgtgtcatgttgttcctaatatccagcagggaagaggatgatattactcccaatatcggagagggtgtacacttcccctgttatattgtttctaatacccagggggaagaaggatgacattactgccaatatcacagggtgtgtaccccaccctgctattgttcctaatattcaaaaggaaagatgaaaatattactcccaatatctcagggtgtgtacacctctcctgtgatatcgttcctaatatccacaggaagagagaatattactctcaatattgcaggggggtgtacacccccctgtgatattgttccaaatattcgggcggggagaggatgatattagtcccaatatcgcagggggtgtgcaccaacctgtgatattgttcctaatatccatgcgggggaggacgatatcactctcaatgtcgcaggaagtgtacacctctcttgttatatttttcttaatatccaggagggaaaagatgatattactgccaatatcgcagggtgtgtccaccccccttttatattgttcctaatatccaatggaaaagaggatgacattgctctccatatcccagaaggtgtacaacgcccctgtaatattgttcctaatattttgggggaagagaggatgatataacttataatatcacaggaggtgtacaccacccctatgtattgttcctaatatcctttaagggagaggatgatattactcccaatatctcaggtggtgcctattccccctgtgatattgtttttaatatccaggggaagagagtatgatattacgcccaatatcgcagggggcatacaccctctctgagatattgttcataatatatagagggagagaggatgatattacttccaatatcagaggtggggtacaccccccggttatattattcttgatatccaggaggggagaggttgatattactggatatatagcagggagtgttcacatcttctgtgatactgttcctaatatccagaaaagtagaggatgatattactcccaatatcgcagaacgtgtacacctccctgtgatattgatcctaacattcaaaggggagaggatgatattactcaaaacatcacagggcatgtacactcccctgtgatattgttcctagtatccagaagggagcaagataatattactttcaatatcgcagggggtgtacacccctctttggtatgtttcctaatatccagaaggaaagagggtgctattactttccatattgcaaggggtgtacacccccctgtggtatggttcataatatccagggagggaaagggtgctattattccccatatcgcgaggcatgtacaccctgctgcggtacggttcctaatatccagggggaaagaggatgctattacttcccatatcgcggggtgtgtacacccccgtgtggtatgttttgtaatctccgggaacgaagagggtgttattacccctcatatcgctggaaatgtacactcccctgtggtacggttcacaatatccaggggattgagggtgctattactccccatatcgcggggggagtgcacctccctgtggtatggttcgaaatatccagggtaagagagggtgctattattccccattttgcaggaggcgtacacccctctatggtatgttttgtaatatcccaggtaaggggtgctattgagagaagagagcaaaagaccccccccatattgttctgtattattttatactcagtacctgttttaagaagaaacaaggaagcgaaaccaaaggcaggcagcccggcgccaggcaccagatccaaaaccagacccgaaaccaggcctgggccttcctgaccttagcctgaaagttaaaattcaacccatgacctagcaactgatgttatccatagattccagacattgtatggaaggacattgtgaaatttcttgttctgttctgtttcactctgagtactggtgcatgcagcccttgtcacatacccactagattgctcaatcaatcatggccctttcatgtaaaaaccttagtgttgtgagcccttaaaaaggacagaaattgtgcactcaacaagcttggattttgatactctagtctgctgatgcttccagctgattaaaagccacttccttcactacctcggtgtctgtgggattttgtccgcggctcctcctgctacactgtgactccccttatagagaggggtgtacacccccctttggttcctaatatccagcgggggagtaggtgctattactccccatattgcggggagtgtacacccccttgtagtacggatcgtaaaatcaaggagggagagaaggtgtaattatccccatatcacagggagtgtacacccctttgtggtatagtttgtaatatccacgacgggagagaatgctattactccccatatcgtggagggtgtacaccgccctgtagtatggttcgtaatatccggaaggggagaggttgctattactccccatatggtgggaagtgtacacccccatgtgatatggttcataatatccaggggggtagaggatgatattacccacaatatcatagaaggtgcacacccttttgtgatattgtccataaaatccagaaggggagaggatgatattacttccaatatcacagggggtgtgtagccccatatgatattgtttgtaatatcaaggtagggagaggatgctattccttacaatagctcaaggggtgtaaccttcttgtgatattgtttgtaatatccagaaggggagaagataatttttttattttaaaagtaaactttaatgtcaaaaatgcaaacttgagaagggcagaaagatcaaacagaaggctgccacttcacaattggagggttgcacagtggccgggcagaggcgctcctcactccccagacggtgaggcagccgggcagaggtgctcctcacttccgagatgttgcaggagccgggcagaggtgctcctcacttcccagaacagggggctgccgggcagaggtgctcctcactgcccagacggtttgcaggcctggcagaggcactcctcacttcccaaacggagcagcggcaagccagaggcgctccacacttcccagatggtggggcagccgggcagaggcgatcctcacttctcagagggtagggcggcccagcagaggcgctcctcacttcccacatggtggggcggcaggctagaggcgatcctcacttcccagacggtggtgtggccatgcagaggtgctcctcacttcccagatggtgtggccgccgagctgaggcactcctcacttccctgacagtggggcggctgggcagaggcgctcctcacttcccagacacttggactccgggcagagactctcctcatttcccagatggtggggctgccgggcagaggcgctcctcacttcccagacggttcagaggccgggcagaggcgctctggggagaggataatgttactcccaatatcgcagggggtgcacactccctgtgatattgttccgaatatccagagggggaaaggatgatatagctcccaaaatcgtggggagtgtacacccccctgtgatcttgtttgtaataccaagaagaaaagagaatgctattatttccaatatagcagggggagtacaaccccctgtgatattgttcgtaatatctagggggagagaaaattatattagtcttaatatctcaggggacgttcatccccctgtaatattgttggtaatattcagaatggagaagatgatattgttcttaaaatacaggaaaaaatatgataatattacttccaatatcgaagggggtgtacactctcctgtgatattgttcccaatatccagaatgaaagaggatgctattactcccaatatcccagggagtgtacacccctttgccatattgttcataatatccaggggaagacaggataacattactcccaatatcaccgggggtgtccacccactagtgatatttattgttcatcatatccagaaaaggagaggatgatattactcccaatattgcaggtggtgtacggtccctgtgatattctttgaaatatctagaaaaggagaggatgatatcactccgagtatcacagggggtgtacacccccctgtgatattgttcgtaatatccaggggagaaaaggatgatataattgccaatatttcaggggatgtgcacctccctgtgatattgtttgtaatatccaggggtggagaggatgatattactcaaaataacgtaaacatcctgtgtgtacatcccctgtgatattgtttataatatccaggggggtagaagatgacattacccccaatatcacagagtgtacacacccctgggatactgttcataatatccaggcgggaaagaatgaactacttccaatatcgcaggatatgtacacccccctgtgatatatttcctaatatttatgtgggtaaggatattacccccaatatcacagaaggtgtacatcctctttgtgatattattcctaacatccaggaaaggagagaatgatattactcccagtatcgcagggggtgtacaccacccctgtgatattgttgctaatatccagggggagaggataatattactcccaaaatcacaggggacgtacactcctcctgagatattgttcctaatattcatggggaaaagaatgctactactccaaatacagcagagggtgtacaccatccccgtgatattgttttttatatccaaagggtgaaaggctgatattactcccaatatcgcagggggtgtacaggccccccatgatatcattcttaatatccagggaggcaaagaatgatgttactcccaatattgcaggctgtatacaccccccgtgatattgttcctaatatccagagtaagagaggatgacattgctcccaatattgcaggggttgcacgcacgccctgtgataatattactcccaatatcaacagtgggtgtacactcctcctgtgatattgtttgttatatctaagaaagaagaggatgatattactgtcaatatcacagaaggtgtacagccccttgtgatgttgtttctaatatccagcggtgagaggatggtattactcgcaatattgtagggggtgtccaacggccctgtgatattgtttctcatattcaaaaaggaaaagaataatataactccaaatatcgcagggtgtgtacacttccctgtgatattgatcctaatatccaggaagagagaggatgatattaatcccaatatcacagggggtgtacatcgcttctgtgatattcttcctaatatccagggggggaggggatgctattactcttaaaatcgcagggaacttacactcccactatgatatttttcctaatatccaggaagggagaaaatgatattactcctaatatcacatatcacaatgggtgtacatctccccgtgatattgtttctaatatcaaggatgggagaaaattatattactctcaatatcgcagggggtgtgcacacctcctgtgatattgttcctagtatccagcggaggagatgatattactttaaatattgtagaaggtgtacaacccccctttgatattgttcctaatatccagggggaaaggagatgatattactcctaatatcgcaggggctgtacaaccctatgtgatattgtttcttctaatatccaggggtggagaagataatattactcctaaaatcgaaggggacatacactccccctgtgatatttttcctaatatccagaaggaaagaggatgatattactcctaatattacaagaaatgtatacctgtcctgtgatattgttcctaatatccagaggggtaaatgattatattactcccaatatcgcaggggtgtacaccttccctgagatattgtttctaatatgcagtggaggagaggatggtattactcccaacatcacaggagatgtaaactccccttgtgatattcttcctaatgttcaggacgaaggagggtaatattactcactgtattgcagcagggggtgtagagccccctgtgatattgtttttaatattcaaggttggagaaaataatattccttccaatatcgcatggggtgtacacccttctttttatatagtttctaatatctggggggagaggatgatattactcccaatatcgcagggggattacacccccactgtgatattgtttttaatatccagggtgggagaggataatattactccaaatatcccagggctatacaccctccgtgtgatattgtttctaatatccagaggaagagaagatgatattactcccaatgtcacagggtgtgtacaggccttctttgatattgttcttaatatccatgagggagaggatgatattactcccaatatcgcaaagactgtacaccctttctgtgatattgcttccaatatccagggagggagaggatattacactcaggatcacagggggtgtacaccccaacctgtgatattgtttctaatatctagggaaaatgagggtgatattactatcaatatcacaggaggtgtacactcccttatgatattgttcctaatatccaggagaatgacaggataatattactcccaatatcgcgggtggtgtctccccccactccgtgatattgttcctaatacccagagggggagagaatcatattactcccaatatcgcaggggatgtacacctacatccggcggagtagaagataatattactcacaatatcgcaagaagtgttcaccttccctgttatattgttgctaatatccagggagtgagaagatgatattactttcaatactgagcgtgtacactacccctgtgatattgtttctcatatccagtagaggagaaaatcatgttactcccaatattgcaggggtgaacacctcctttgtgatatttttcctaatatcaggaaagggagagtatgatattacccttaatattgacaggggtgtacacccccctttgatattgttccaatatccaggggggcagaggataatattattcccaatatcgcagagggtgtacaccccccgtgatattgttcctaatatccagagaaataaaaaatagtattatttccaatatcacagggcgtacattttccctgtaattttgttcctaatatctggggggtggggtggcaggataatattactctcaatattggagagggtgtacacccccctgtgatattgttcctaatattcagggtgggagagaatgatgttactcccaatatctcaggagtcgtatacacccccttgtgatattttttctaatatccaggaggcagaggatgatattgctcccaatatcgcagggggtatacacccgagctgtgatattgtttctaatatgcaatatgggggaaggatgattttactttcaatatcgcagggaatgtacactttccttgtgattttgttcctaatatccaggggtggagaagatgctattactatattactcctcatatcgcaggcggtgtacaactccctgtgatatggttcagaatatccagagtgaaaaaggagggtgacattactcccaatatcgggggggtgtacacccctttgtgatgtggttggtaatatccaggggggcagatgagggtgatatcactccccatatcgtggaaggcgtccacttttttgtgatgtggttctttatatcccgaggggagaaggtgatattactccccatatcgcgaagggcatacacccccctgtgatatagctcataatattccggagagtggaggaagatactatgccctatatcgcgggtggcctacaaccccctatggtttggcttataatatccaggggggagagggtaatattgctccccatattgtggagacgtacagccccctgtgatatggtttgtaatatctttggggggcgagggtgatattactccccatatcgcggggagcatacacccccgtgatctggttcatagtatctcaaaggaagaagttgatgtgtacaacttaagggaaaaagttgaagtgaagtgtacacacgccctgtgacgtggttcataatatccaggcgggggagaggagagtgatatttactccccatatcgcgggtgttgtaaactcccctgtgatatagttcataatatccaggggagagaggagggtgatattgctcctcatatcgcgaagggtgtacaaccccctgtgatatggttcataatatccagaagggtagaggacgatgatattactccacatatcttgggaggtgtgatatggttcgtaatatccagcgatgagagaatgatattactccccatatcgcaaaaggtgtgatagggtttgtaatatcctgagggggagagggtgatattaatccctatattgcagaaggactacaccctcccatgacatggtttgtaatatcccagggggtagagtgtgatattactttccatatcacagggggtgtgatatgattcgtaatattcgaagggggagagggtgacactactctccatatcacggggtgtgtgatatggttcttaatatcccaggggttagaggttgatattaccccctttttggggggtgtgtacaccccctgtgatatggttcgtaatatcccgggggagacagggtgacattattccccatatcgaggggatcgtacaccccctgtggtgtggttcataatatccctagggggagatggtgatattactccccatatcagggggcgtgcactcttctgtggtataattagtaatatccagggggcagaggtcgatattcgtttccatatcatgaagggagtacacttccctgtgatatggttcctaatatccaggggggagagggtgatattattccccatattgcggggggacatacaacccctgtgatatggttcataataaccagaaaagaagagggtgatattaatccccgtattgcagagggcatacaccccccctgtgatatggtttgtaatatctaggggaggaaaaggtgatattactttccatattgctgggtgcagacacccctttatgatatggttcataatatccaagttggagagggtgatattacttcccatatcatgggaggtatacccttccctgtgatatggttcgtaatatccagaaggggagagattgatattactccccatattgtggggggcgtacaccttcctgtgatacggtttgtaatatctaggggatatagtgggtgatattactcaccatatcacgggggttgtaacatggtttgtaatatccaggggaggagagggtaatgttactccccatatctcggggcatgtacaccctcctgtgacatggttcgtaatatccaggtcgggagagggtgatattactcctcatattgccgggggtgtgttatggttcataatatcctggggaaggaggctgctatcactctccacatcttgggggatgtacactctcctgtgatatggttcataatatccagggtgggtgagggtaatattactccccatatcgcgggaagtgtacatacccctgtaatattgtttgtaatagaagagagggtgatattactccccacatcgcgggtggtgcccacccccctgtgatatggtttggaatatccagggggatgaggagggtgatattactccccatatctcggtgggagtacatccctctttgatcaagttcataatatccaaaaggaaacaggagagtgatattactccccatatcgccgggggtgtacacgggagggggagtacacccccggcgatatggtctgtaatatccagggaaggagaggagggtgatattactcaccatatcgcaggtggtctacatttacctgtgaaacagtttgtaatatccagggggggaaatgagaatgattttttttttttgagtctcactgtgtcacccaggttggagtgcagtggcacgatcttggctcactgcaacccccgcctcctggactcaagcaattctcctctcccagcctcctgaatagctgggactacaggcgcaccccacaacgtctggctaatttttgtatttttattagagacggggtttcaccatattggccaggctgatctcgaactcctgaccctgtgatccatccgcctcggcctccaaaagtgctgagattacagatgtgagccaccacgcatggcccaaggagaacgatattactccccatatcccagggggtgtatatccccctgtgatatggttcagaatatccggaaggaaagacagggatattacttcccatatcgcaaggggtgtgacatggttcgtaatatcccatgggggagagggtaatattactcttcgtattgtgaagggcatacactcccctgtgatacagttcataatattccggggagtagaggaagatattatgctccatatcgcgggtggcataagccccctgtggtttggttcataatatccagggaggagagggtaatattactccccatattgtggggacgtacaccctcctgtgatatggtttgtaatatcccagaggggagagagtgatattactccccatattgcagggacatacacccccctgtgatatggttcaaaatgtcttttttttttgaaggactggttctttatttcaaaaagacacttgtcaatattcattatcaaaacagttgcactattgatttctctttctcccaatcggccccaagtagaccacatcaaaggagagtacatattaagccaataagctgtaggatgtacacctaacagacctcctagaaaccttaccagaaaatggggacagggtagggaaagaaactttaaaagatcaacaaactgccagcccacggactgcaggggctgtcacagccagatggggtggccagggtgccacaaacccaaagaagcaaagtttcaaaataatataaaatttaaaaagttttgtacataagctattcaagatttctccagcactgactgatacaaagcacaatgagatggcacttgtagagacagcagcttcaaactcagaaaagggtaatgagatgagtttcacatggctaaatcagtggcaaaaacacaatcttctttctttctttctttctttcaaggaggcaagaaaagcaattaagtgctcacctcaacataaggggaacatgatccattctgtaagcagttgggagggggtagagatggaacaaaattttggtctcagaggtcttgccatcttaatttggtcacttctaatgaaaaaaataaaaaatagaaataacattatccaaaggtatcttaaagctgaaaacttgaacagcacattttttgttgttgttgtttggctaactcctcctggaaccacctttctggcttagctagtactttgtacagagcaatgaggcttcccatagtggagtctccctgggctctgtttggctctcagcaaggcaggcctataccttttcctctcctccatggagagaggaatatgcattaaggtgaaaaatcaccttccaaaagtgagaaagggattcgatcgctgcttcagggctgtggtattatatggaatgttttacaaaaggttgctacaaaacaacaaaagaggtaattacaaaatgtgtacatcacaacatactttttaaagacattatgcattgtgctcacattcccttaaatgttgtttccaaaggtgctcagcctctagcccagctggaatctccgggaagaggcggacagtttggtgaaaaagacacagggaaggagcgggcggcggaaggagggggcggcgaaaggagaaagcagccttccagttaaagatcagccctcaattaaaggtcagcttcgggcaggctggcctcaggcggagtctggttcagagggaggagcagcagcagggtgagactgaggcgttctacatctcattcaggtcaagcagagtctggtccagcatcctttgtgtacagaggtgctcccctttggtgcatttcagtttatcttccaagtcatcaattgtcttttccagcttggctaccgatctctcagcaaactcagcatgggtctccgcctcctttattttatcagtaagaatcttgatctcttcctcatatttgtcttctttttgagagtacttttcttcagcagcactcagacacttcaggttctggtccatcagtctaatctgctcatccatctctcggcaaagggattctgccagctcagctcgttcctctgtgcgttccaagtctccttcaatgatcaccaacttacgagccacctcttcatacttcctatctgcctcttctgcaatgtgcttagcttctctgagttggatttcctggagttccatcttttcttcatcttttaaggcccggttttcaataaccttcttacctctctcactctcatcagcagctttttccgcttcttccagcttttgcagggcagtagccaggtgctcctgagcacggtccagctcctcttcaaccagctggatcccacgttcaaggaggccacctcagcctcagcctgttcccgggcccacctttctccctcaacttctcgctggaggcgctcagctcgctcctctgcatcatctgcctgctgctgcagaacctggatcttgcgcttcaccgcctcgatggtggtgatcccagccatggtgcccacccagctactgctagagctccggttcctgcctcctccgatcggcgttgcagcctcctctcacccttacttccgcctcggttcaaaatatcttaagggaaggagttgatattactccccacatcacgggaagtttacatcccctggtgatatggtttgtaatatcccagggtggatagggtgatattactctccatatcgcgaaggagtactcccccctgtgatatggttcataatatccttggggggagagtgtgatattactccccatatcgcgagggccatatactcctttgtgacatggttcgaaatatcccggtgggggagggggtagagggtaatattactccccatacagcgaagagcatacgcccttctgtggcaaggttagtaatacttcagggaaaagagtgcaatattacttttcatattgcagggaacatacactcccctgtgacatggttcgtaatatcccgggggctgagagggtgatatttctccccatatcaccgggggcctacacctgggtgtgatatggctcataatatacagggagggagagggtgatattactccacataccgagtgaggggttacacaccctcgtgacatgttcgaaataccccaaggaggagacaatgatattactttccctgtcgcgggggctacaccctcccagtgatatggttcacaatatcccggggtggagagggtgatattactccctatatcaccggggggtgtacacttccctgggaaatggtttacagtatccccggggggagagggtactattactccccatatcacgttacatatcagggtacacccccacgtgatatggtttgtaacatcccaggaggaagaaaatgatattactccccatatcgcggtggcatacacccctccccgttaaatggttcataatatcttggggtggagagggtgatattactccccatatcacgtggggcatacaccccactatgatatggttcataatatcccggaggggagagggagatattactctccatgtcgcggggggcatatacacccctgtgatatggtttgtgatatcccgggggcggagagggagatattactctccatatcgtggggtcgtacacttttctgtgatatgattcgtaatatccagacggggagagggtgatattacttcccatattgcgggggcgtacacccctctgtgatatggttcataatatcccgaagaaaagagggtgatattactcctcatatcgcggggaacacacaccaccctgtgatatggtttgtaatattcagcgggggagagagtaatattactccctgtatctcggatggcgtacactcccctgtgatatggttcataatatccagaagaaaagagggtgatattactccccatattccagggaatgtacaccaccctttgaatatggttcgtaatatccaggaggggagagggtaatattgctcccaatatcgaaggaggtgttatacggttagtaatatccagagaaggagagggtgacattactccccacatcgtggtgggtgtgcacccacctgtgatatggttcataatattcaggttaagagaggtgatattgctttccatatcgccaagggtgtacactcccgtgaaatacagttcgtaatatccaaaaggggagagggtgatattactcccatatcgtggggggtgtacacccctctgtgatatggttcataatatccagggtggaataaggtggtattactccctgtatctcggggcatgtacatcgcctgtgatatgattcataatatccagaagaagagagggtgatattaatctccatattgctgggggtgtacaaccccctgttgtatggtttgttacactgagttggggagagggttacattactctcaatatcgagtggggcatacacacttatgtgatatggttcataatatcccagggaggagagggtgatattactccccatatcgcgggaggcatacaccccaatgtgatatggtttgtaatatctacatttttttttttgagacgaagtctcgctcttgtcccccaggctggagtatgatggccggatctcggctcactgcaacctcagcctcccgggttcaagcgattctcctgccttggtcccccaagaagttgggattacaggcgcacaccaccacgcccggctactttttgtatttttagtagagaaggggtttcaccatgttggccaggctggtctagaactcctgacctcagatgatccacctgcctcggcctcccaaagtgctgggattacaggcgtgagccactgcacctggcctggtttgtaatatctatgaagggggaaggtgatattactttccatatcacgggaggcgtacaccacgatgtgatatggtttgtaatatccagggggtatactgggtgatattactccccatatcgcggggagtgtatacccttttgtgatatggttcctaatattaagctgaggagaaggtaatattactccccatatcgcaggggtttttatatggttcataatattcaggaagagagagggtgacattactctccatatcacggggtgtgtactcccccatgtgatatggtttgtaatatccagggaaggagaggttaatattactccccatatcgcagggggtgtacacctctctgtggtttgtaatatccaaagggaagaggatgatattatcttcaatatcttggggggatacagtccccagtgatattgttcataatatccagagggggaggggatgatattactcccaatattgcaggtggtgtacaaccccctgtgatattctttataatatagagggggatgatgatattactcccaatatagtaaacaacctgtgtgtacaccccctgtgatattgtttataatatccaagggtggaaaggatgatattactcctcatatcgcagggggtgtatacccctctgtgacattgttcctaatattcaggggaggagaagatgatactactcctcatatcacaggggatgtacacccccctgtgatacttttggtaatatccaggggaggagaaaattatattattccccatgtcacagagggtgtacaccccgctgtgatagtgttcataatatccaggtgaaaagaggatgatattactccgaatatctcaggaagtgtacacccttctgtgatattgttcataatatccaaaggtggagaggaggatactactccccatatcgcagtgggtgtacacccccctgtgatatggttcataatatccaatgtaggagaggatgatattactttccatatcgcggagagtgtacatccccctgttatattgtttgtaatattcagggagaaagaggatactactactccccatatcacacggggtgtatattcccctgtgatatggttcctgatatccaagagatattataatcctctcttggattatgctacctctcatatcgcatggggtgtacacacactttgtgatatcgtttgtcatatccaaggagggagaggattatattaatcccaagatcacggggggtgtacaccctcctgtgatattgtttgtaatattaaggggggagaggataatattactcccaatataattaacaccctgtgtgtactcctccttgtaatattgttcataatatccaatgggggagacgatgatattactttcaatatcgcagaggatgtacatccctttgtaacaatgtttgtaatataaaaggcaagagaggatgatactacttccaaaattgcaggacatgtacaccccccggtgatattgttcctaatatccagtggggaagaggatgatagtagtcccaatatcgcaaagggtgtacacaccccctgggatattgttcctaatataaaaggaggagaggatgctattattcccaatatcacagaaggtgtaaaatcccctgtgatattgttcgtaatattcaggaggggagaggattatattactcccaatatcacagggtgtgtacacagggaggggcaagggccagaagcgggcgggaatccccatgtttgggcggacccagtttctaatggccagcatttgccaatcaaagcttaccagagaactctaaaagccagggctttcctgctagacaagactcatttctggaactgctttaaaaagaaacaaaacttcccaaggaccccttttcctctctgtctgcctaaaataatgttttaaaaactcctaaagcagctgaattcagcccccttcctgggggaatgtatagacggaactcccacctttcccggcatcccaaggccagagtatgtgaaactcctgggtctctatgtgtgtctgagcggctgctctgccaacactccacacagccctgtgtcctggacccaaggcccttatgacctgagctcaagaggggatctcctgatccatgggttgcaaagatccatgggagaagcatggtttctggggcggggtcacacgctcagtcactgtttccctcggatgccggagatggttcctttggctctctgccaatacagggtgaatcatcatccatccctcttttctttgttctcccgggtcaagttgtttgcctagtcagtcccaatgtgagaacctgaatatttcagttgacgcgctgacttcaaaatccccgggcttcgggaggcggagcttgcagtgagccgagatcccgccactgcactccagcctgggcgacagagcgagactccgtctcaaaaaaaaaaaaaaaaaaaaaaaaaaaaaagtccccgggcttttcttttcactcagtggaaggcagctgcttctaattggccatcttggcccgcccccaccacgtgaccttctgtaaaatgcctccactctccaggaacgctctcattatataactttgcctgaaaccaacagcacgctcattgcacatatcatgggctcatttatttcacttataaagaacctggccaaggaagagatagtgcctaaagtggccagtattctgaccgatatgttagaaaaatggtgtgccgaccaattcatgacatgtgtcccaaaactagcaacggaaattgtattcgccgtgttgaggtctctaatccagatgatgctcatctatgtactggaaaaggcagagtcctttcctgacaagctgctgaaactcttcagaaacatctcatatttcctgaagaagatgatgtctggacaagcagcacaggtcgttcagatttaactttctattcatatatccagcacgatattcgcacaattgtcacgaaaccttaccagttgatgagtcctgcacatttcctttaatttcaggaggaagagggtaatccggatgagttttctgacctactctgctgctgtgattaaacaaccaccaggaaattttgacgacactgttctcctgagctcctccctttcctccgggaacaaaacaattgaatttacaaaaataaagtgttatttgactggagtgaggtctcatgtctgcttatgcggtggctcgctgctcagaacagggtgagtctctgggttgtgtgctgaggaggggaggctctcaatctggagaaaacccactgcaggggacacctccatggggtctgagggactgaggatgaggagccggactgggtctagggaaggaggaggtttcagagggtgaaattctggcactaaagcctgggggtgtttgggaacttcctccttccgaagaagtttcagggagggataaagacaaaccctgggctccttgaggggcccttactaatttgagaggactctatcgggaaggagagtgacaatggcctccttgaggactgaggcccctgaataaatgaggcccagatacagtccatgggggatgagaccttcaagggtcacattttggttgggacagaggaaaagtgcagctctgcagccgcagaggaaaacccggcagtgtgaaagcgaccttggaggggccctgtgcgctctgaatgcgtctgagcccccatcccctgtccccgcctctctttctggattcttccagctcggctgtctccgccatcttctgagcgctccaccctgacttattcaagtttcccttctgccttccaagtactccaaaatctttcagatctgtgtccctacccctgtttttagcatgtgttggggctccaggtccctgaaggtttctggcctgaaatccacctccccagcggagtggactgcgttctagagactccacactccgcgaggttcccaggcccctgagggacaaccgagtggcctgcgcacttcagggctccacactcggcaaggtctttcaagcccttggggtccccttcttagttttttccacctttctgggctgcagtcactccataaatgctgggatctgatccccacccccactctcgtttcctcaattctgcgggctacacgctctggcaaggtcctccgggccctggatcccctccctctccctatgcccacgctcctagtcagcccttctggggtccactattttcaggaactaaccgttctcatggagccttgctaaccggaaagctgtgtggaagaaaggctttgaggatagaggtggagatttggctcttccatagtgccactcacccaccccaccatgctgccactgccagacccggacccctgtttcagaacaagtgaccagattcgctcctggacagccctggacactggccttttctctgaaaactactcaccctttctctagtccccacttcatgccagcctcataccctcttccttcccccacgctggcttccgggatcctcctctgctcagacaacctcttctgtgtcccacccccgtttttagaatgctttggggcaccaggttgggggaaggtttctggcctgatatccatctctttccaaactcccttcttcccttgaaaggcttcttgccttcagccccacttctggctccgaggtttcaggacaccctcctcttcatcctcattcttttgaccaccagctttttaggaattcgaacgtccctctcatcttcgtgaatcctgtccaggcatttgttgaccccttcatctgatacccctgacctcacattgccaaaagtctacccctacccagtacactggaattagacaaaatcccaggagttttacctcaactctgagtgtgcccacaggagctctccctgaagccacgtccttttaagcagggtctagggttcctcccttgtcttaatgaactctttgtcacacggaggacgttatggagcccttatgatctttcactgcctttctgcccagcgttttgtctttccatggacatttataatattttccatggacattttgttctctcaatgtccacccctaatttccaacatcccaaagattctcatgtgtttcctgaaagccatttacaggaatggctgtgcccagacccccttccccaggatcctccttcacacctggtaggtgcctctcctagagagatttgcactcagttgtcgtgcagtcacatggcccagatggttgttaatcacccccttcctggcaacagctagcagccagggaatcactggcacagaaacctcagggtgaccaagatgaggccacctctgtgctgaaggctgtgctccagagcctgcttgggatcaggcttaagcaggtcttcagccagacctgatgttacctggtttccttgagctgccctgcctgagctatcgggagcactccctcaatgcacatcttgattccctatctcatgctctgcttctagaaaccatgagctatcaattgctactggcaatggtcctgggaagtcaaccctaagtatggattctggggttggatgactccccacaggacttcagtgagcaacaatcactgctggcagttggaggacagagtcgctagggcatgtgaccactgtgaaaccaccgatgtttcacctggggtaattttggatgaactacggtagaagcactgaaggtacattgcttttggtttggaagattgtaggtaaataatagcgatatgaatgtggaattggatggctgcaaacgagtgccattgatgcattgaaagaggaaaagtcaggctgtcacctgtcactcagcaatttaaagtgtgagagttgggactagatgtggtggctcacatctataatccagagattcgggggaagcttgaagaggtaggatcttttgagtccaggagttccagaccagcctggacaccagagcaagacctcatctctacaacaaaattttcttaaaaattagatgggcttggtggcacgcacctgtacttgtagatctagctaatggggagcatgagataaaaaaatcacctgagtcagggacttaggggttacaatgaggtatgattgtgccagtgcacacactcccacctggccaacagagtgagattctgcttccaaaaaaataagaaataaatcaggtttgagagttggaaagcatcatcttctcctagagccaaaggacatgtacaactgagacccaggaacaaagcttcatcacaaagagaccatcatcagtggagccgggagatgcattccccctcaccctgccttgaggaggcagtggagtcatctgtctgggatcctttctgacccagccctatttgtttgtctctttggcttctttggatttgtatattttagctgttataacactgtaaaacaaacagagtgatttttttgagttgtgtgaatgatgctagctccatagtcaccctgagagtgatgggaacttttgaatttgtggcaagttggagggtagtgtaagtgacctgagattgccaaattggggctagcactggatgtgaggttaggctagtggaaaaatatgcccagaaccagaggagtgtgggctcactgcaggtggttaggctcagatccaaattgtacagatggatagctttggggtaaagaataacatagttgagaagtgcatgtgttagtctgttcatgcactgctataaagaattacctgagactgggtaattatttataaaactcaggtttaattgggtcatggttccacaggctgtacaaaaagtatgatgctggccatcagctcaacttctggggaggccccagaatagttagagtcatggcaaaaagtacaagggaagcaggctcatcttccacggccagagctggagcaagtggtaggagaggtgatacacactttcaaacaagtaggtcttttgagaactccatcaccggacagcacctatgggatggtgctaaattattcatgaaatatccgcctccataatccactcaactgtcaccagcgcagccagccccacctccaacagtggggattacaattccatatgaggtgtgggtggggacacagctccaacctcaatcagtgggcatcctggattgggtctactatagaaggagaaccaggagctgactatgatcttgaaccctacccatgatggccgggcggggtgactcatgcctgtaaccccagcactttgggaggctgaggtgggtggatcgcctgaagtcaggagttagagaccagcctggccaacatggtgaaaacctgtctctactaaaaatacaaaaaattagaccggcgttgtgctggatgcctgtaatcacaccactacgctccagcatgggaaaaaataccaaaacttcgtctcaaaaaaaaaaaaaaaaaaaaaaaaaaaaagactgcccatgaccactgcaccagtgagagggacaccagcatcactgagatgcaagggctggacattcttcataggtcagagctcaaagcaggggacactgatacagagatgggctccatccatagcaccaaagtggtgagaggatgtgggaatggcagaggccagcactttgccatcaatgcaagggggtataaggaggtgacaccagtgccagagtacatcacggggggactgccctacaatatctaggacttacctcttagagcgtgtttcattagcgacaacagatataaatggcagacaggtgtgtccctgcattaacaggaaatagaaatcatcaagaggaacagaaggcagatgtcagcagccccttagaaagtcatcatccttcatacagttaaaatctgagacagttctcacacgagaaggcctaactcaaaaagaggctgggttctcatgaggcaggtttatgcaaaaccaaggaaggtgtacaagtttggaattctccagtttcccttggaaaagacctacagtcatttgcttaggtaactgagcactgaacaaaggtgagtattgttgtcttttagaagctcttggccaagaaggccttgttggcataaaacccatggtttggaaacatcaccatgacccctgttagagtaatggcctaagggtgggggtcaggaaattgatgtattccttgccaacttctgcctctaagtgagtgaactctgtttgtgaacctctctcctctgtggttatgttcctaggctctcatgtataatcaggagtcatagacttagaaacaggaaaaatacttacagtgtttttgtggcctgtgagctatgacttataattttaggaaaaaaacaattgcaaatggaaagcctaagtctatcaatgctcatccaagacaacataatcaataaaaaccaatatcaaatctcaaggcaaattatttcctgtatatagatggcagagatgagcaccaccatcaaaaactcaaggaccagtgctgtgggtccagtcatctgtttcatggaattcaccagtctggtatcttcaaaatccagaaggatgatggcagatggcaggaaagtaatgcaaacgtcatcaggtgtgaccccactgtagcagctgtgatggatgttttctctcaccatagcaataaataacacaacctcggtcacactgtatgcattgttggtctgcaaaatccatgttttgcaaaactcttcaggaaggtggatctgtaatattggcattgacatgagaacaacagcagtatttattcacaatctcaagctctctgtcttcccgtctctctcattagccatccaagtagtcctgaggaaccaagcccatcagaacattctgcaacataatacacagctccattctccattcaaattttgttgttgttgttgttgttgatgagacaacatcttactccatcagccaggctgacgtacagtggggctatctgggctgactgtagtcttgagcttccaggctcaaggcatcctctcacctcagcctcctaagtggcttgaactacagacacacagcgacatgctgggctagtttttgtatattttgtagagacgtgctctcaccatgttattcaggctggactcaaactcctgagcgtaagtgatccaagcaccttggcctcaaagtgctgagattacaagcctgagccactgcacccagcccaatctccattctactgataacaatgtcattaccaggtctgatggacaggaaatggtaaggtttctgaaaacctaaggatcacacagcgagttccaaaggctgaaagtgcatacctgtcgacactgataccaatgacatccaatggtgagaatgacattccttgtagtcctagctctgctcataacaaatctatactgaagtgtaagagtttgatggtcatggggattttccatgtctctgcctttcagcgatgtgccatatctgtgaagtgttcagaaatgcaacagcctgaggcatgctgggcatatcctctaataaaaaggaaaatgccattttatggtcctgtatttctacaagttggaacacatgggcctgtgatccagatgggggaaatgggaatattcccactcattcaccttcatccacgaagcccatttgaaagctttgggcttcccatccttgtagattttagtgttgtgggctgggtgcagtggctttcacctgtactgccaacactttgggaggcctagacaggtgaatccactgaggccaaaagttcgagaccagcctggccaagatggtgaaaccccgtccctactaaaaatacaaaaattagcaaggtattggggccagcacctgtaatcccagctgctcgggaggctgaggctggagaatcgcttgaacccaaaaggcagagactgcagtgacccgatcctgcctttgcactccacctgggcaagcagaacaaaacttctgtcttgaaaaaaaaaacaaaaaacgaacaaaaaagatgttagagttctgggtttagaggtctataccccagaaagagaatggtttcaacaagggacaaagaagttgctttaaacgttgacttgccatttcttttcagtgtgtttgttctcttgcgtcaagagaccaccagaaaagtggtgcaattactctcctgtcaagaatcattgactatcatctgcaagagggtcagatcctggtatataattagggcagaaatacttagtctgagaagggtatgacatccagaggccctattaatgatgtccttttctccatgcctgactctgaccccatgtgctggactgcccctgtgtggatggcctcatggcctgctcggactctgaggtcccaccccaagtggcacctccatggagggctctactcttgtatgggctctgacactcacactgagacactctcccatggacacctcttcacccacttggggtctgaaactgggctactccatccctccctaacctggaacagagagctttcactgctattacacaagtcatagaggctaactcctcatttttccaagctaattattgaaacattagtcctgggttgataagacaagataagttaacttttcataaatttgcttatcaagttttgaataaattcaaataaattcaccttccccacacaccttagttgtcgacatcacacgcgcacccatactcacagggtgagcacgaaggcttcactgtcagtggagaaagtggcaaaacccttctgtgcctcatcctggtctagacctggccctcatcctttcccactcttcccctcactcccttggattcatccacactggcctcctgcctgctgctccacctccctgcgaagctcacccctgcctcagggcctttgcacgtgcagtggcttcaagccatatcctcttcacccagatctcccagatctcctgaatgatcttcttttatcattcaggtctcagcttgcatgtaatcttctcagtgaggattacccaaaccacatagttcattcattcattcaaatattcattcaatggcatattgacaaagcagctacttcatgccaggccttgggccaggtgttatggatatggcaacaaacaaaacaagagttttctgctctcaaatttttacccacttaaaggagatatcatacatcatctgtaaataaatacatcatctgtaaataatgatgtaaataaatacatcatctgtaaatctgtaaataatgatgtaaataaatacatcatctgtaaataaataaagtataataaaagaaaatagtaggtttttttggttggaggtgaccgtgaagtttgcaaataccatcttacaacacattattttattttatttcatttcatttttaattttattattattatactttaagttttagggtacatgtgcacaacgtgcagatttgttacatatgtatacatgtgtgaagttggtgtgctgcacccattaactcgtcatttagcattaggtatatctcctaatgctatccttcccccctcccccaccccacaacagtccccggtgtgtgatgttccccttcctgtgtccatgtgttctcattgttcagttcccccctatgagtgagaacatgcggtatttggttttttgtccttgtgatagtttgctgagaatgatggtttccagcttcatccatgtccctacaaaggacacgaactcatcattttttatggctgcatagtattccatggtgtatatgtgccacattttcttcatccagtctatcattgttggatatttgggttggttccaagtctttgctattgtgaagagtgccgcaataaacatacgtgtgcgtgtgtctttatagcagcatgatttataatcctttgggtatatacccagtaatgggatggctgggtcaaatggtatttctagctctagatcactgaggaatcgccacactgacttccacagtggttgaactagtttacagtcccaccaacagtgtaaaagtgttcctatttctccacatcctctccagcacctgttgtttcctgactttttaatgatcgccattctaactggtgtgagatggtatctcactgtggctttgatttgcatttctctgatggccagtgatgatgagcatttcttcatgtgttttttggctgcataaatgtcttcttttgagaaatgtctgttcatatccttcacccactttttgatggggttgtttgtttttttcttgtaaatttgtttgagttcattgtagattctggatattagccctttgtcagatgagtaggttgtgaaaattttctcccattctgcaggttacctgttcactctgatggtagtttcttttgctgtgcagaagctctttagtttaattagatcccatttgtcaattttggcttttgttgccattgcttttggtgttttagacatgaagtccttgcccgtgcctatgacctgaatggaaatgcctgggttttcttctagggtttttatggtttgaggtctaacatgtaagtctttaatccatcttgaattaatttttgtataaggtgtaaggaagggatccagtttcacctttctacatatggctagcctgttttcccagaaccatttattaaatagggaatcctttccccacttcttgtttttgtcaggtgtgtcaaagatcagatagttgtagatatgtgacattatttctgaggactctgttctgttgcattggtctatatctctgttttggtaccagtaccatgctgttttggttactgtagccttgtagtatagtttgaagtcaggtagcatgatgcctccagctttgctcttttggcttaggattgactttgcaatgcggggtcttttttggttccatgtgaactttaaagtagttttttccaattctgtgaagaaagtcattggtagcttgatggggatggcattgaatctataaattaccttgggcagtatggccattttcacgatattgattcttcctacccatgagcatggaatgttcttccatttgtttgtatcctcttttatttcattgagcagtggttttagttctccttgaagaggtccttcacatcccttgtaagttgggttcctaggtattttattccctttgaagcaattgtgaatgggagttcactcatgatttggctctctgtttgtctgttattggtgtataagaatgcttgtgatttttgtacattgattttgtatcctgagactttgctgaagttgcttatcagcttaaggagattttgggctgagacaatgggttttctagatatacaatcatgtcgtctgcaaacagggacaatttgacttcctcttttcctaattgaataccctttatttccttctcctgcctaattgccctggccagaacttccaacactatgttgaataggagtggtgagagagggcatccctgtcttgtgccagttttcaaagggaatgcttccagtttttgcccattcagtatgatattggctgtgggtttgtcatagatagctcttattattttgagatatgtcccatcaatacctaattattgagagttttcagcatgaagggttgttgaattttgtcaaaggccttttctgcatctattgagataatcatgtggtttttgtctttgggtctgtttatatgctggattacatttattgatttgcatatattgaaccagccttgcatcccagggatgaagcccacttgatcatggtggataagctttttgatgtgctgctggattcggtttgccagtattttactgaggacttttgcatcaatgttcatcaaggatattggtctaaaattctcttttttggttgtgtctctgcctggctttggtatcaggatgatgctggcctcataaaatgagttagggaggattccctctttttctattgattggaatagtttcaggaggaatggtaccagttcctccttgtacctctggtagaattgggctgtgaatccatctggtcctggactgtttttggttggtaagctattgattattgccacaatttcagatcctgttattgctctattcagagattcaacttcttcctggtttagtcttgggaaggtgtatgtgtccaggaatttatccatttcttctagattttctagtttatttgcgtagaggtgtttgtagtattctctgatggtagtttgtatttctgtgggatcagtggtgatatcacctttatcattttttattgcatctatttgattcttctctctttttttctttattagtcttgctaccggtctatcaattttgttgatccttttaaaaaaccagctcctggattcattaattttttgaagggttttttgtgtctctatttccttcagttctgctctgattttagttatttcttgccttctgctagcttttgaatgtgtttgctcttgcttttctagttcttttaattgtgatgttagggtgtcaattttggatctttcctgctttctcttgtgggcatttagtgttataaatttccctctacacactgctttgaatgtgtcccagagattgtggtatgttgtgtcttttttctcgttggtttcaaagaacatctttatttctgccttcattttgttatgtacccagtagtcattcaggagcaggttgttcagtttccatgtagttgagcggttttgagtgagtttcttaatcctgagttctagtttgattgcactgtggtctgagagacagtttgttataatttctgttcttttacatttgctgaggagagctttacttccaagtatgtggtcaattttggaataggtgtggtgtgatgctgaaaaaaatgtatattctgttgatttggggtggagagttctgtagatgtctattaggtccgcttggtgcagagctgagttcaaatcctgggtatccttgttaactttctgtctcattgatctgtctaatgttgacagtggggtgttaaagtctcccattattattgtgtgggagtctaagtctctttgtaggtcactcaggacttgctttatgaatctgggtgctcctgtattgggtgcatatatatttaggatagttagctcttcttgttgaattgatccctttaccattatgtaatggccttttttgtctcttacgatatttgttggtttaaagcctgttttatcagagactaggattgcaacacctgcctttttttgttttccattttcttggtagatcttcctccatccctttattttgagcttatgtgtgtctctgcacgtgagatgggtttcctgaatacagcacactgatgggtcttgactctttatccaatttgccagtctgtgtcttttaattggagcatttagcccatttacatttaaggttaatattgttatgtgtgaatttgatcctgtcgttatgatgttagctggttattttgctcattggttgatgcggtttcttcctagccttgatggtctttacaatttggcatgtttttgcagtggctggtactgactgttcctttccatgtttagcgcttccttcaggagctcttttagggcaggtctggtggtgacaaaatccctcagcatttgcttgtctgtaaaggattttatttctccttcacttatgaagcttagtttggctggatatgaaattctgggttgaaaattcttttctttaagaatgttgaatattggcccccactgtcttctggcttctagagtttctgccaagagatcagccgttagtctgatgggcttccctttgtgggtaacccgacctttctctctggctgcccttaacattttttccttcatttcaactttggtgaatctgacaattatgtgtcttggagttgctcttcttgaggagtatctttgtggcattctctgtatttcctgaatttgaatgttggcctgccttgctaggttgcagaagttctcctgggtaatatcctgaagagtgttttccagcttggttccattctccccatcactttcaggtacactaatcaaacgtagatttaatcttttcacatagttccatatttcttggaggctttgtttgtttctttttactctctttcctctaaacttctcttctcacttcatttcattaatttgatcttcattcacttatatactttcttccacttcatcaaatcggctactgaaggtattgcatgcatcatgtagttctcatgccatggttttcagctctatcaggtcatttaaggtcttctgtacattgttttctctacttagccattcgtctaatcttttttcaaggtttttagcttccttgtgatgggtttgaacatcccctttagctcagagatgtttgttattactgaccttctgaagcctgcttctgtcaacttgtcaaagtcattctccatccagctttgttccattgctggtgaggagctgcgatcctttggaggagaagaggtgctctggtttatagaattttcagcttttctgctctggtttctccccatctttgtggttttatctacctttggtctttgataatggtgacctagagatggggttttggtgtggatgtcctttttgttgatgttgatgctgttcctttctgtttgttagttttccttcgaacagtcaggttcctcagctgcaggtctgttggagtttgccggaggtccactccagaccctgtttgcctgggtatcaccagcggaggctgcagaatagcaaatattgcacaacagcaaatattgctgcctgatccttcctctggaagcttcgtctcaaaggggtgcctggctgtatgaggtgtcagttggcccctactgggaggtgtctcccagttaggctagatgggggttagggacccacttgagaaggcagcctgtccattcacagagctcaaacactatgctaggagagccactgctctcttcagtgctgtcagatggggatgtttaagtctgcagaaatttctgctgccttttattcagctatgccctgcccctacagatggagtctacagaggcaggcaggcctcattgagctgcggtgggctcctcccagttcgagcttccagaccactttgtttacctactgaagcctcagaaatggtgaacacccctcccccacccagtctgccgccttgcagttccatctcagactgctgtgctagcagtgagcgaggctccatgggcgtgggacccactgagccaggcacaggatataatctcctggtgtgccatttgctaagaccattggaaaagcacagtattaaggtgggagtgtcccaattttcccagtacagtctgtcacgggttccctcatctaggaaaggtaaatcccctaaccccttgtgcttcccggtgacgcaatgccccaccctgcttcagctagccctccatgggctgcatccactgtccaaccagcccaatgagatgaacaaggtacctcagttggaaatgcagaaatcacccatcttctgtgtggatcaggctgggagctgcagaccggagttgctcctattcggccatcttggaatggcaatctatgtttgctttttacatttgaaaaaactggtgtcacgtacctaggtattaatcattgtggtatcctcttgccgatttacctctttatcattaactagtgaccctccttgtcttttgttgttacagtctgtgattttagtctattttatctaatatgagaatagctactctggcacttttttggtttccagcttcatgaaatatccttttccatttccctgttttcatttccctttcggtgtctctatagatgaagttgatttctttaaggcaccataagttgggtcttatttctttatccatttgaccatttagagaatttagaacactgtcagtgttattattcataagtaaaaacttaagagtgggtgtagtggtgtacatctgtatttcctgcactttgagagactgaggcgagctgatctcctggggtcaggagtttgagaccggcctggtcaacatgatgaaaccctgtctctactaaaaatacaaaaattagccaagcatgctggcatgtgcctgtaatccaatttacttgggaggctgaggcaggagaagcttgaacctgggagacaaatgttgcagtgagctgagatcacacagagaagtcatctccactctcctcatcagaacctcttgttcacagcatttgtgagcacaaatcaatgatggttattctttcctactaattagggatattttattacacagcaatagcctccagcaaagggaaccatcatacatgattcctacaagttgacagggctggaattatcactgaaaaactaaggtggctatacttgattcccaatgtccaatttttcatgaatagagaaatttatcctttttccccccagccagaaaccaagttttgctcttacgcccaggctggaatcaagtggcacaatctcagctcactgcaacctctgccccccagcttcaagaaattcaccttttgaacaaggagatattaaggatacactatgtgtatgctaccggtggttgcaggagactcagaaaagagagaaacagtcactggcctcgtgcaactgatattctcgggaggagagaaaggcaatcaagaaagaaacatgctgtatttcagacagctgtaagtcctccacaagaaaagaaagcaggtgaggaacataggaaatgtgtcaaccataaggttcccgctaattctataagttggtcagggatatcctccaagaataagcagcatctgagcaatcacctgaagggaggaaggaaggaagactgtgagtggtggcttacacctgtaatcccagcactttgggaggccaaggagggcagattgcctgagctcaggagttcacgaccactcagagcaacctgttgatacccaatctctactaaaaacacacaaaaaaattacccgggtgtggtggcacgcacctgtagtcccagcttccatgcccagctgatttctctctctccatatatatatatatatacacatatattgtttttgcagagatagggtctcactgtgtcacccagtcatcaagcaattctcttatactgttttggaaaagcatgggaattacaggtgtgaaataccctgctggtcctgaaaaatgtgatatttgggattctctgcctggcttgttttacccaaaataatgacctccagttccttccaggttgctgcaaaagacatgattttcactgttttataactgaatagtattcctgtatgtatacataccacattttctttatttattcttctgttgattgacatgtagggtgattccatgtctttgctactgtaaataatgctgcagcaaatatttgtgtgcattttgatctattcctttgagtaggtacccagtactgcaactgcaggactgagtagttgttatattttttgttctttcagaaatctccatagtgtttgccataaaatctgcactaatttacattcccaacaacaatgcataagatttccccttttctccacattctcactaacatttgttatgtttttgtctttttcataatacccattctgactggagtaagatatctcattgtggtggttgttgatatttttgagacggggtctcactctgttgccagactggagtgcagtggtgtgatcgtggcttgctgcaacctccacctcccgggttcaagcaattctcctgcctcagcctcccgagtagctgggactacaggcgcgtgccaacaggcctggctcattttttgtatttttagtaaagacagggtttcaccatgttggccaggatgatcacagtctcttgagctcatcatacacctgcctcagcctcccaaagtgttggaattacagtcatgaggcagcgcacccaacctcaatgtggttttaatgaccatttctctgacgattcatggtgtggagaatttctttgaaataccttttggccatttatatgtgctcttttaaaaactgactcctgtccaggtgcggttgagcatgcctgtaaccccagaacttcgggaggctgaggccaatggatcacttgaggcaaagaggcagaaatcagcctggccaacaaggcaaaaccccatctttactaaaaatacaaaaaatcagccacgggctgtgactcgtgcctgtggtgcaagttactcaggaggttaaggcacaggaattgcttgaacccggtaggcacaggtcacagtgagccaagatcatggcactgcactacagcatgggtaatagagaaagacctgtctcataaaaacaaatgaataaataaataagataaaaaataaaaaagtctctttatgtcctttgccgactttttaatgggattctttggagttttctgttgtagttgagatctttgtttactctcggtattagtcttttgtcaaaggaaaagtttacaaataatttcttccgttctgcagtttgtctgctcactctgttgagaggattatttctttggctgtgcagcagctttttgtttcagtaaagcttttgaatttatataattaaaattttcagtttggtttaaatttgcactggtcgatttttggttttgttgcctgtacttttgaagtcatactcttgaactctttactagacaataaccagaagagttttctctagttttcttctcacatttttattatttcagtacatatatttaagtctataattcatcttcaattgatttttgtagaaatagtgagaaataggagtccaggtttattcttctgcaaatgacaattcaattgttccagcaccaattattgaaaagggtgtgctttcctcaacgtatattcttatcagctttgtcaaagatcagttggctataaatgtgtggctttctttctgggctctctagtctgttacatcaatctgtgtgtctatctgtatactactaccatgctgtattggtgatgatggctttgtaatataatttgaagtcaagaaatgtgatgctcccagctttgtttatttgcttcagaaaggctgagtcaacagctgcagagatgaagctgcccctcctcgcagggctccttcccggaaaaagatcatggctcccactgaccatataaccatggctggaactcctgaaattcccaaagggaggccctacccagtgaggggggatgaatgaaggtcctacttaaggaatctgtctggccacaatcaggcacagcagctgtgctgccttgtgggggaccagaccacctggattccctggagcctgcaggctagaatgtctgagtccatggaaacacagaaatggaggccgccctcacctccccagaaaactgtagtctcaggcagtctccagccgattgccactggttggctgctattccaagccagtgggtcttaacttgagaggtgctgtggaagtggggcccacggaatgaggctgcttggctccctggattcagccccttttctaagggaatgtacagatggaactcccgccttgcccagctttccaagtatataaaactcctgagtctctgtgagtgtctgagcgagtgctctggcaacattcgacacggctctgtgtatctgacccaagacccttatggcatgagctaatgggaggatcttctgatccatgcgtggcaaagatgcatgggagaaacatggtttgtgggtaggggttgtgcattcactactgcttctcttggctgtaggtgaaggtttctttggctctgtgctgatactgggtgcaccatcacccaccccctttgtttcttctcctgggtcaagtcatttgcctaatcagtcccaatgtaggaacctggatacttcagttcaaggtgctgaattcaccgtgcttttcattcaggggaagacagctgcttctcattgggcatcttggcctgcccacttcacgtcactttttgtaaaatccacaccactccaggaatatccattacttaacttcgcctgaaataaacagaaggctcattacacttatcatgggctcacttacttcgcctataatgaaggtgccatggaaatgctagtggatgacgtggtccattttcttagggatgagatagaaaaatggtgtatggctttttaatttaattaaaatttttagtttggtttaaatttacattggtctctttttggttttgttgcctgtacttttgaagtcttactcgtgaactctttactggacaatgaccagaagagttttccctaagtttcttctgatattttgaccatttcagtacatacatttcagtctataattcactttaaattgatttttgtaaacatggtaagaaataggagttcagatttattcttccgcatatgataatgcaactgtcccagtaccaattattgaaaagggtgtgctttccctagtgtatattcttgtcagctttgtcaaagatcagttgcctatgaatgtgtggctttcattttggattctctcgtctgttacatcaatctgtgtgtccacatttatacctgtaccatgctgtattggtgactatggctgtgtaatatattttagagttaggaaatgtgatgctcccagctttgttcatttgcttcagctgaaaaggttgagtccacaattacaaagatggcagccgcccatccccggaggacctccaacccagaaagagatcaggcttcccaccaaccctataaccctggctggagttcctgaaattccaacagggaggaccttcccagtgaggagggatgaatcaaggtcaaatttaaagaaacagtctggccactatcaggcacagcagcagtgctgccttgtgggggacccctcctgctccagaccagctgccctccctggagcccgaaggctagattgtctgagtctacggaaacagagacggtggccgccccaaccacccagaactcggtagtctcaggcacttggcttgctatcttgccactgcttggctggtattccaagcccgtgggacttgagaagtgctgtgatgatggggaccacaggatgaggctgtctggctccctgtgatatggctgtgatgagtggaggaacaccagggctcatgtctcacacagaattggagaaaatgacacaaacacatgtacagtggttttatggcgtgcagtttaataggcaagaacgaaggaagagctccccatactgagacagagggaggggggctccaaagccaaaagaggaaacccggagtgctgtggataccaatgagttatatgaagaaactggagggggcggtgtctgatttgcatagggttcaggcgattggttcgaccaggcatgtcatttatgtggcccacggaaaaactggccctcccacctagcctttgaatatgcacgtgccggacaccctgatttcctacactcatggggatatatgggggtggccatatcgccaggcacaggtggggacaagggccagaagagggcgggaatcgctatgtttgggtggacccagtttctaatggccggcatctgcagatcaaggttaccggagaactctaaaagccggggctttcctgctagacaagactcatttctggagctgctttaaaaagaaacaaaacttcccaaggaccccttttcctccctgtctgcccaaaataatttcttaacaactcgtataacacctgaattcagcccccttactgggggaatgtaccaacggaactcccacctttcctggtttctcaaggctagattgtgtaaacctcctgggtctcggtctgtgtctgagcagctgctctgccaacactccacacagccctgtgtactaggcccaaggccgccgtgactcagcccatgggaggatctcctgatttcttggttgcaaagatccatgggagaaaaatggtttctggggcggggtcacacactcatggcttctcttggctgtgcaagaaggttcctttggctctgttccaatatagcgtggttcatcacccacccctgttttctttgttctcctgagtcaagttgtttgcctagtcagtcccaatgtgagaacctgaatatttcagttcacgtgcttatcgtgaaattcactgagactttaattcagtggaaggcagcctcttctaattggccatcttggcccgccccctccacgtcacctcccataaaatggccacgctctccagggacgatgccattatatatctttacgtgaaaccgacagaacacttattacactttttgtgagctcatttacttcacttataatgaacatggccatggaaatgctagtggagaaagtggtcgattttctgatggatgtgataaaaaaatggtttgccgaccaattaatgacatatgtctcaaaactagtaacgagacccttaatcgctgggttgaagtttctaatcaagaagatgctcatctatgtattcaacaaagcagcttcccttgcttctgaaatgcttccaaacaacatctcatatttcctgaagaagataatgcctggacaagcagcacaagtcattcaggtttactttcagctcataaatccagcaggatattcgcacaattgttgggaaaccttatcagttcatgagtcgtgcatgtttcctttaatttcaggaggaagagggtaatctggaagagtttcctgacctactctgctgctgtgattaaacaaccaccaggaaattttgatgacactgttctcctgagctcctccctttcctcggggaagaaaagcattgaaactacaaaaataaagtgttatttggctggagtgaggtctcatgtctgcttatgcggtggctcgctgctcagaacagggtgagtctctgagttgtacgctgaggaggggaggctgtcaatctagaaaaaacccattgcatgggacacctccatggggtctggggggctgaggatgaggagctggactggatctagggaaggaggaggtttcagagggtgaaattctggcagtaaatcctgggggtgtttgaaaacttcctccctcagaaggagaagactcagggaggaataaggacaaaccatgggtcccttgaggggcatttactaacttaagaggactttatcgggaagcagagtgacaatggcctccttgaggactgaggcccctggataaatgaggcccagatccagatccagtccatgggagatgagaccttcaagggacatatttttgttgggacagaggaaaagtgcagctctgcagctgcagaggaagccttggcagtgtgaaagcgaccttggagggggccctgtgcgttctgaatgcttctgaggtccatcccctgtccccgcctctttttctggattttttgggctccatggtctccgccatcttctgagcgctccacgctgccaccttcagttttctcttctgggctccaaatactccaaaatctttcatatctgtgcccctacccctgtttttagcatgtgttgggactccaggtccctgaaggtttctggcctgaaatccacctccccagcggtgtggattctgctctagagaccccgcacttggcaaggttcccaggcccctgggggacaaccgagtggtatgtgcacttcagggctccacactcggcaaggtctttcaagcccttggggttccctcctcagttttcttcacatgtctgggatgtagtcactctataaatgccgggatgtgatccccaccccagtgattttttttagttccatgagtgttgctatctgaatagtcatcctgagagtgatgggaccttttgaatttgcagcaagttttagattagtgtgagtggcctgagatcgcaaaactggggctagcattggatgtgaggttaggctggtggaaaaatttgcccagaacctgaggagtgtgggctcactgcaggtggttaggatcagcacagaattgcaaggatgtatagctttggggtaaagaataacatggttcagaagtacatgtattagtcttttcatgcattgctataaagaattacctgagactgggtaattaattataaaaactcaggtttaattggctcatggttccacaggctgtacaaaaaggatgatgctggccatcagctcaacttctggggaggcgtcagaaaacttagagtcatggcaaaaagcacaagggaatcaggctcatcctccatggccagagctggagctagtggtaggagaggtgctgcacacttttgaacaatcagatctttttagaactctatcaccagacagcacctagaggatggtgctaaattattcatgaaatatccacccatatgatccactcaattctcaccggcccaaccaggaccacctccaccattggggattacaattacacatgagatgtgggtggggacacagatccaaactcgatcagtgggcatcttggactgggtctactatagaagaagaaccaggagctgactatcatccttaagactgcccatgatggccaggcagggtggctcatgcctgtaatcccagcactttgggaagccaaggtgggtgaatcccctgaggtcaggagtttgagaccagcctcgccaacatggtgaaaccctgcctctactaaaaacacaaaaaattagatgggtgttgtgccagacgcctgtaatcacagctactccagaggctgaggcatgagaattgcttgaacctgggaggcggaggtggcggtgagccccaatcgcactgctacactccagcatgggcaacaataccaaaacatcgtctcaaaaaaaaaaaaaaaaaaaaaaaaggctgcccatgaccactgccccagtgagagggacaccagcatggctaagatcaagtgctggacattcttcatgggtcagacattaaagcaggccacactgttacagagatgggctccattcatagcaacaaagtggtgagaagatgtgggaatggcagaggccagcactttgccatcaatgcaaggtgggcataaggagctggcaccagtgccagagtgcatcaggggaggactgctttgcaatatctagcacttacctcttagagtatgtttcattagggacaacagatataaatggcagacaagtgagtcccttcagtaacaggaaatagaaatcatcaagaggaacagaaacagatgtcagcagccctcatataaagtcatcatccttcatccagttaaaacctgagacagttctcacataagaaggtctaattcaaaaagagactgggttctcatgaggcaggttcatgcaaaaccaagggaagtatacaactttgggattctccagcttcccttggaaaagacctacaatcatttgcttaggtaactgagcactgaacaaaggtgagtattgttatctttcagaagctgttggccatgaaggtcttgctggcataaaacccatggttggaaacatcaccatgacccctgttagagtaatggcctaagggcaagggtcaggaaattgatgtattccttgccaacttctgcgagacgagtgttggtccactcatctctttcacggaattcaccagtctggtatcttcaaaatccagaaggatgatggcagatggcaggaaactaatgcaaacaccatcagttgtacctccactgtagcagcagtaatggatgttatctcttcattgtaatatccagggagggagaagatgacattattctcaatattctaaacaccctgtgtgtacagcctctgtgatattttttgtaatatccgtgtgggagagaattatattactcctaatatctcaggggttgtgccccctctgtgacaatgttcctaacacccaggaggggataggatgatatcacttttagcatcacagggggtgtacaccccactgtaatattgttcataatatccgggggggagagaatgatattactcccaatatcgcaaagactgtacaccaacctgtgatattatttgtaatatccataagaggaagaataatattactcccaatgtcacaggaagtgtacacccttctgtgatattgttcaaaagatccagttagggaggggatgatattactctcaatatcttaaacaccctgtaggtaagccctctgtgatattcctcataatatccagagggagaggatgatattactcccaatattgcatgaagtctacaccccacctgtgatattgttcctaatatccaggatgggagaggatgatattactcccaatgtcgcaggggatgtacaccttccctgtaatattgttcgtaatatctagaaaaggagaggataatattactttcaacatcgcagggggtgtacaccttccttgttatattgttgctaatatccagggaaaaagaagatgacattaccaccactattgcagaaggtgtacacccccccttgatatagttcctaatatccagaaaaggagaggagatattactccaaatattgcaagaggtgtacattcccctgtaatatttttcctaacattcaggaagaaagagagtgatattgcccttaatattgaagggagtgtgccccccccgtgatattgtttctaatatccaagaaatgaaaggatgatattactcccaatatcacaggggctgtacagccccctcccatgatattgttcccaacatcggggggggggtgaaatagtattattcccagtatcacaataggtgtacacacctgtcgtgatattgttcctaatacccatgggggaaaggacgatattattcttaatatctcagagggatgtacaccctccctgtgatattgttcctaatatccggggtgggagaggatgatattacccccaaaatctcaaagggtgtacacccctcttgtgatattgttcctaatatccagggtggagaggataatattattcccaatatccaggaaaggaaacgatgatgttactgtgaatattccagggggtgtcctcccctctgtgatattgttcctaatatccaggttggggagattatgatatttctccaaatatcacaaggggtgtacaccaaccctgtgttattgttcctaatatcgatggggggagaggacgatattactcccaatatcacagggggtgtacaccacctttatgatattgttcctaatatccatgaagaaagaggatgatattactttcaatatcgcaggggatgtacactccccctgtgatattgttagtaatacctaggagaagaaagtgtgatattactcccaatatcgcaggggatgtacacgcttcctgtgatattgttcctaatatttagggggaaaggggatgatattactcccaatatcgaatggtgtgtacacccccccgtgattctttttttttttttttttttttttttgagatggagtcttgctctgccgcccagactggcgtgcaatggcgcaatctcggctcactgcaacatttgcctcccaggttcgcacgattctcctgcctcagccttcggagtagctgggattataggcagctgtcaccataccaggctaatttttgtatttttagtagagttggggtttcaccatgttggtcaggctggtcttgaattcctgacctcaaataatccacccaccttggcctcccaaagtcctgggattacaggcataactttccctgtgatattcttcctaatattcaggaagaaagaggatgatattgctcccaatatcgcagagagtgtgcactcctcctgtgatatggttcttaatattcagaggaggagaggatgatattactttctatattgcagaaggtgtacacctccctcgtgatgtctttcctaatatccagtgggggagaggttattagtctcaaaatcacagaaggtgtaaacccccatttgatattgttcctaatattcaggggtggggagagaaaggtattactcctagtatttcagggcatgaacacccccaccgtgatatcattcctaatatccagaaggggaggcaatgatatttctcctaatatcacaaagggtgtacaccccttctgtgatattgtaaatattctgtgtgtacacccccctgtgttatagtctgtaatatccgggtgggggagagggtgatatttctccccatattgtaggggatgtacacccttctgtgatatggttcgttatatccagggaagaaaaaggtaatattgctgcccatattgtggagagtgtacacccccatgtaatatggttcgtaatatccaggagtggagagggtgatactgctccttacatcgaggaaggtgtacaccttattgttatatgattcgcaatatccaggggaggagagagtgatattgctccccatgtcgcagggggtgtaaaccctccgtgatatgattggtaatatccaggaaaggaaagggtgatatttctccccatatcgcgggggacgtacatcctcctgtgatatggttcgtaatatccaggaggaaagaggaaaatattgctcttcataacccgaggggtgtacaacccctgtgatatggttcgtaatacccagaagtgtacacccctctgtgatatggtttgtaatatccagggggttagagggtgatattgctccccatatcgcagtgggggtacacccccctggattggttcataatattcatggggggagaaatttacatttatcctcatatcagggggggtgtacaccccccgtgatatggttcgtaatatccaggggaagaaagggtgatattgctccttatatcgcggaaggatcaccctcccctgtgatatggttcataatacccagacgggaagagggtgatattgttcttcataaagcgaagggtgtacagccccctgtgatatggttcataatatgcaaaaggggagagggtgatattgctccccatatcacggagggtgtactcccttctttgatatggttcgtaatatccaggggtgtagatggtgatatagctcgccctattggggagggtgttcacccctctgtgatattgttcgtaatgtccagggaaagagaggatgatattactcccaatatcgcagaaggtttacaccactctgtgatattgttcataatatccagggaaggagaagacgatattactcccaatatggcagggggtgtagaactcctgtgatattgtttgtaatatccaggcaaggagaggatattactctcaatatcgcagaaggtttacacccctatgtgatactgttcatgatatccagggaaaaagaggatattactccctatatcacaaagggtgtacacccctttgtgatattttttgtaatatccaggggagagaggataatattactctcaatatcagaaggggtgaaaaccctcctgtgtcattgttcataatatttagggaaggagagagtgatattactccaaatatcacagtgggtgtacacccccctatgatattgttcctaatttccagaaggggagatatgatattattgccaatatcgcagaaggtgtacaccttactctgacattgtttgtaatatccagatggggaaatgatgatattactcctaatatcacagggggtgtacacccccttgttttattgtttgtaatattcaggggaagagacgattatattactcccaatatcgcagggtgtgtacaacactctatgatattgttcataatatccaggggaggagaggaagtgtacacccccccgtgatattgttcgtaatatccagaggtagagaggatgatattactcccaatattgcaggtggtgtacacctttctgtgatattgtcatgatattaagaaggggagaggatgatattactaacaatatcacaaaaactgtacactccctgtgatattgttcataatatccagaagaagggaggatgatattattctgaatctcgcagaagatatacaccaccctgtgatatggttcataatatcctaggggaaagaggatgacataactgtcaatatcgcagggggtgtacaattccctgtgatattgttcacaatattcagagggaaaaaggataatattactttcaatatcgcaggcggtgtacacattactgtgttattgtttataatatccggaatgagagaaaattttctcccaatatcacaggaggtgtacactcccctgtgatattgttcgtaatatccagggaggggagaggatactattactcccaacatctcagggagtgtaggccccccctttgatattgttcctaatattcggaagtggagaagatgatattacttccaaaatcgcagggggtgtacactccctctgtaatattgtttctaatattcatgagtggaaagaaagatattactcccagtattgcaggggacatacaccacactgtgatcttgttcacaatattcgggggggagaggatgatattactcccaatatcaaagtaggtgtacacccccttctgatattgatcgtaatatccagaattaaagatgataacgttactcccaatattgcagggggtgtacatttttgaatactgttcataatattaagagggggaggggatgatatctgtcccaatatcgcaaagtgtgtacacctcctgtgacattgtcccaaatatccagaggaaaaaaggatgttattactcttaatatctcagagagtgtacacctccctgtgatattgtttgtaacatccagaagaaagaggctgatattactcttaatatcgcagggggtgtacacccccgccccgggatattattcgtaatatccagggggaagtggaatgttcagaatgggagaggatgatattacttgcaatatcatagtgggtgtacaccccactgtgatattgtttgtaatatccgggaaaggagaaaatgacattcctccccatatggcaggggctgtacaccacctatcatattgttcaaaatatccagaaggggagaggatatgtctccaagtatcacagggggtgtacaccccgctgtaatattcttcctaatatccagggtgtgagaggataatagtactcccaatatcccagggcatgtacaccccccttgtgatgttgttcctaaaattcatggggagaaagaatattactcccaatatcacagggggtgtacatacactctgtaatattgttgccaatatgcagcaggagagaggatgatattactcccaatatcacaggggctgtacaccccgctgggatattgtttctaatatcaagggggaaaaaggatgatattactcccaatgtcgcagggtgtgtacttcctctttgtgacattgttcctaatatccaggagagaagagggtgacattccttccaaaactgaaaggggtgtacacaccctttgagatattgtctttaatatccagaacgaaacaggatgatataactcctaatactgcaggggggtacaccctctctgtgatactgtttctaatatccaggaggggaaagaaaaatattaatcccaatatcacagggggtgtacattccccctttaatattgttcctaatatccaggaagacacaggatgatactatttccagcagcacagggcatgtacacccctttgtgatattgttcctaatatccaggaaaagagaggatgatattactgtcaatattgcagggcgtatacactggttctgtgatattgtttctaatatccgggggtggagaaaatgatattactcccaatattccagcgggtgtacacccgttctatgatattgttcctaatatctgggggagagagaatgatattattgtcaatatcacaggggatgtacagattccctgtgatattgtttctaatattcacagggggagaagggtataatactcccgatatcgcagggggtgtacactccccctgtgaagttgttcctaatatccagggattgagagaatgatattactcccaatatcacaggcggtgtaaaccccctgtgtgatattgttcctaacatccagaggaaaagatgatgatattattttcaatatcacagggggtgtacgcatccctgtgatattgtttctaatatccaggggaggagaggatgatattattgttaatatcgcagggggtgtaccccaccctgtgatactgttcctaatatccggggtggaagaggataatattgctcccaatatcgcaaagggtgtacaaccttcctgagatattggtcctaatatccagggagggagaggatgatattactttcaatatcacagggagtttacacaacccctgcgatattgttcctaatatccagcggaagaagagttaggataatactattttcaaaattgctgggtctgtaccccctccccgtgatattgtttctaatatccaggaggggagaaagtaatatgactcccaatatcttagaagatgtacaccctccccataatattatttcttacatccagggggtagaggatgattttgctttcaatatcacagagggagtaaacctttccggtgatattgtttttaatatttaaaaagagagaagataaaattactcccaatacaaaggggatgtattgtgtactcccccctctgatattcttttttaatatccagatggagagaggatgatattactttcaatattgcatgggatgtataaatcccctgtgttattgttctgaatatacaggtggggagagtatgatattactccaaatatcgcagggggttctttccccctgtgatattgttcctaacattcagggagggagaggatgatattactcttaatattgcagggggtgtacccacgcctatgatattgttcctaatatccagagggggagaggatgatctaactcagaatatgacaaggggtgtacacacagcctgtgatatggttcctaatatacaggggagaaggggataatatttctcccaatatcgcagggggtgtacaaccccctgtgatactgttcctaatatacagaaggggacagcatgatattgttcctaatatcgcaggaggtgtacaacgccctgtgatattgttcctaatatccagggcgggagaggatgatattaccctcaatatcgcagggggtgtgcactttccctgttatattgttcctatgatccgggtggggggaaatgacattagtcccaatatcgcaggatgtgtgcaccgctcccccgtgatattgttcctaatatcaagggggagagaggaggatattactcccaatatcgcaagggatgtacatcctccatgcgatattgttcgtaatattcaggaggagagaggatgatattactcttaatatcgcagaaagtggacacccaccctgtgatgttcttcataatatccagggaagcagacgattatatgactttcaatatcgctgggagtgtacatcccttttgggatattgtttctaatatccaggaagggagaggattatattactctcagtattgcaggcagtgtacaccttttttgtgatattgttcctaatattcagaaagggaaaggatgatattactcccaatattgcaggtggtgtatatccccctctgatattgttccttatatcaaggaagagaaagaataatattactcccaatatcaaagacagtgtagacccctcctgtgatattgtatttaatatccatggggaaagaggatgatgttactcccaatatcgcagggggtttacacccacactgtgatattattcctaaaatccagtggaggagaaaataatattgctcccaatattgcagggtgtatacaggccctcccccgttatattgctcctaatatccagcggtggagaggatattactttcaatttgtgtagggagtgtatacccccctgtgatatttttctaatatcaaggatgggaaaggatgacattactcccaatatcgcaggaggtgtacacgccctgtgatattgttcctaatatctagggaaggagaggatgatattactttcaatattgcaggagctgtacaccctctgtggtattgttcttaatatttaggttgggagaaaatgatatgagtccaaatatcgcagaaggcatacacacttccaataacattgttcttaatatccgggggagagggtgatattactcccaaaatctctggggggtgtacacccccttctgatatttttcctaatatccagggaaggaaacgatgatattactataaatattccaaggagtgtacaccttcctaatatcctaatattgttcctaatatccaggggtgggagaggattatattactcccgatatcgcagtgggtgtacacccctcctgtgatattgtttctaatatccaagctaggagaaaatgatatcactctcaataccacagggggtgtacaccttccgcatcatattgttcctaatattcagagggaaagaagatgaagttactttcaatatcggaggggttgtacacaacccctgtgatattgctgctagtatccaggaagaaaggggattatgttactccccttatagcagggggtatacacctcccctgtaatattgttcctaatatcaaggctgggatatacgtggggggaaggatgatattactcccaatatcgcaggggttatacaaccttctgtgatattgctcctagtaaccagggcagaagaagatgatattactcctaatatcgcaggaggtgtacactcccccattatgttgttcccaatatgcagaaaaggagaggatgacattattgccagtatcgcagggtgtgtacaccacccctgtaatattgttccaaatatttagggggagagaggatgatattactcccaacatcgcagggggtgtacacacatcccctgtaatatagttcttaaaatctaggggaaaaggggatcttatttctctaaatattgcagagggtgtacactccccggtgatattgttcctaatagccgggagggagataattaaattactttcaatatctcagagagtgtacatcgcccttgcgatattgttcctaatatccagagcaaaagagaatgatattactcccaatatcttaggagtgtacatttaacctgtaatattgttcctaatatccagggggaagagaatagtattactgccaatatcgtaggggttgtacaccttttctgtgatattgttgcaaatatttagtagagggaaagaatattactcgcaatatcacagggaatgtatacttcccctgtgatattgttctgatatccagaaaaagagagggtaatattactcccaatattgcagggggtgtacaccccccttgtgatattgatcctaatataaaggaaggaagaggatattactcctcatatagaaggggttgtccaccccccttgtgatattattcctaatattcagggaagcagaggatgatattattttcaatatcacagagggtgtgcagtccacctgtgatattgttcttaatattcggggggagaggatgttattatgcctgatatcgcagtagaggtacacccctcaagtgatactgttcctaataaccaggggtgaagaggatgatattactcccaatatcgcaggtggtgtacacccccccatgatggtttctaatatacagagggggagaggaaaatattactcccaaaatcgctggaggtctacaccccccttgtgatattgttcctaatatccaggaaaggaaacgatgatattactgtgaatattccagggggtgtacacccgctttgtaatattgttcctcatatccagggtgtggagaggattatattactcccagtatcgcagggggtgcacgacgcccctgtgatattgtttttcatatccaggaggggagattattatcaatatggcaaggggtgaacaccccctgtgatattgtacttaatagttaggttggcagaaaatgatattagtctcgatatcgcagggggtgtgcactccgcctggtgatattgcttttaatatcaagggggagaaaatggcattactcccaatatcgcagggggtgtacaccgctcatgtgatattgttcctaatatccaggtggagagaacataatattactcccaatatcgcacaaggtgtacacccctcctgtgatatggttcctaatatccatgggaggagatgatgatattactcccaatatcacaggggatgtacaccacccttgtgatattgttcctaatatccagggaagaaaacgatgatattattgtgaatattacagggagtgtacacactccctgtgatattgtttttgatatacagggtgggagaggatgatattactcccaatatcacataaggtgtacaccccccgtgatattgttctaaatatttcggtggggagaaaatgatattagtctccatatcacagggggtgtgtgctcctcaggtgatattgtttttaatatcaagagggggaggagattatattactttcattatcacagggggtgtacacccctcctgtgatattgttccttatatccaggcgaggggaaaataatattactctcaatatcgcaggaggtgtacacaccccatgtgatattgttcctaatattaagggggaaagaagataatattactttcaatatcacagggtttgtactcctttcttgtgatatagtttttagtatccagggggaaagagcatgatattactcccattgtagcaaggggtgtacacacctcctgtgatattgttcctaatatccagaagtggtgaggatgatattactcccaatatcgcagggggtatacaccccacctatgatattatttctaatatccatgggaaaagagtatgatattacacccaatgtcgcagagggtgtgtatttttcctgtgatattgtttctaatattcaggcggggagaagatgatattactctcaatatagcagaaattgtacatccccgctgtgatattcttcataataatcagggaaaaagaggatgatattactaccaatattgcaggggggttacacttcccctatggtagtgttcctaatatccaggaagaaagaggatgatattaatcccattatccaggaagtgtacacccaccctgtcatgttgttcctaatatccagcagggaagaggatgatattacaccccccccccgtgatattctccttaatatccaggaggggagaggctgatattactggatatatagcaggggtgttcataccttctgtgatattgttcctaatatccagaaaaggagaggatgatattacttccaatatcgcagaaggtgtacacctccctgtgatattgatcctgacattcagaaggggagaggatgatattactcaaaataccgcagggcatgtgcattcccttgtgatattgttcctaatacccagaagggaacaggataatattactttcaatatcgcagggagtgcacacccccctttggtatggttcttaatatccagaaggaaagagggtgctattactttccatattgcaaggggtgtacaccccactgtggtatggttcataatatccaggcagggagagggtgctattactccccacagtgcggggcatgtacaccctgctgcggtacggttcctaatatccagggggagagaggatgctatgactccctatatcgcggggtgtgtacacccctgtgtggtatgttttgtattctccaggaacggagagggtgttgttacccctcatatcgctggaaatgtacactcccctgtggtatggttcgtaatatccaggggattgagggtactgttacccccatactccccatatcgtggggggagtgcacctccctgtggtatggttcgaaatatccagggtaagagagggtgctattattccccattttgcaggaggcgtacacccccctatggtatggttcgtaatatccggggtgaggggatgctatcaaaagaagagagaaagagaccccccatattgttctatattattttatactcagtacctgttttaagaagaaacaaggaagtgaaaccaaaagcaggcagcccggcgccaggcaccagacccaaaaccagacccgaaaccaggcctgggcctgcctgaccttagcctgatagttaaaattcaacccatgacctagcaaccaatgttatccatagattccagacattgtatggaaggacattgtgaaatttcttgttctgtgctgtttcactctgattaccggtgcctgcagcccctgtcacatacccactagattgctcaatcaatcatggccctttcatgtaagatctttagtgttgtgagcccttaaaaaggacagaaattgtgcactcaacaagctcggattttgagacgctagtctttcgatgcttccagctgattaaaagccacttccttcactacctcggtgtctgtggggttttgtccgcgactcctcctgctacactatgactccccatatcaaggggggtgtacacccccctgtggttcgtaatatccagcaggggaaaaggtgctattactccccatattgcagggagtgtacacccccttgtagtatggatcgtaaaatcaaggggggagggaaggtgtaattatccccatatctcagggggtgtacacccctttgtggtaaagtttgtaatatccagggatattacagggatattatccccaaattaatacttttataatttcttatgcctgcctttactgcaatctctgaacataaattgtgaagatttcatggacatttatcacttccccaatcaatacttttataatttcctatgcctgtctttactttaatctcttaatctcatcatctttgtgagctgaggatgtatgtcgcctcaggaccctgtgatgattgcattaactccacaaattgtttataaaacatgtgtatttgaacaatatgaaatctgggcaccctgaaaaagaacaggataagagcgatgttcagcgaacaagggagataagcataaggtctgactgcctgtggggctgggcagaacagagtcacatttttcttattgcagaaaatgagtaggagaaatatcactgggaagggaacgcattcctaggggaggcctatggacggccgctctgggggtgtatcccttatgtggttgaagataagggatgaaatacaccctggtcccctgcagtgccctcaggcttgctaggattagaaattccagcctggcgaattctagtcagaccagttctctgctcttgaaccccgtttcctgttaagatgtttatcaatgacaatgcgtgcacagcaggacatggaacctcaatagtaattccattttctccctggccttgtgaccttgctaggcccttctgcccttgtgatcttttattgccatttgaagcatgtgatctctgtgacccactccctattcgtatccccctccccttttgaagtccctaataaaaacttgctggttttgcagatcaggtggtcatcacagaacctgccgatatgtgatgtcaccccggaggctcagctgtaaaatttctctttcgtactctttcactttatttctcagaccaggtgacacttaaggaaaatagaaaagaacctactttgaaatattgggggctagttcccccaatagacattgttcctaatatccagaaaaaaagaagatgatattactcccaatatcacaggggttgtgaaccccacctgtgatatggttcctaatatccaggaagggagagaatgatattactctccatattgcagggggtgtgcacatccctgtgatattgttcctaatatccaggggaggagagggtgatattactcccaatattgcaagggttgtaaactccaccctgtaatattgctcctaatatttaggatttagggggggagaggataatattactcccaatatcgcaggggatgtatatgccctctttgatattgttcctaatatccagggggggagaggataatattactttccatatcacaaagagtgttcacccccctgtgatattgttcctaatatccaaaaaggaagaggatgatatcaatcccaatatcacaggaagtgtacaccccccccttttatattgtttctaatatccaggggaaatgagggtgatatttctctcaatatagcagaatgggtacactccccctgggatattattcctaatatccaggggaaaaaaagaggttgatattcttcccagtatagcagggaatgaatacaccctttgtgatattgcttctaatatcaaggggaaaagaggatgatatgactcccaatatcacaggggatgtaaacctgtggcgttgttgctaatatcaaggagggaagagtatgatattactcctaatgtcgccgaaggtgcacactttccctgtgatattgttcctaatatccaaaagggaagagaatgatattacccccagtattgcagggtgtacaccacccctgtgatattgctcctaatacccaggaaaaaagagaatgctattacccccaatatctaaggggacgtataccttccctgtgatattgtttctaatatccaagtggggagaggatggttttactctcaatattgcagggagtgtacactccccctgtgatactgtttctaatactcgggctgggagaaatagtattactcccaatatcgcagtgatattgtttccctgtgatattgtttctaatatctagtgggggagataattatattactaccccatacacaggggagggtgtacattcccctgtgatattgtttgtaatatccagggaaggagaggatgttactcccaatatcacaggggttgtacaccccttttttgatattgttcctaatatctggggggcagagaattatattactgtcaatatcacagagtgtgtacaccccctctgttatattactctttatattcagggcggtagaggatgatattactccctatatcacagggggtgttcacccctcctgtgatattgtttataatatctaaggggaaagaggatgatatcactctcaatatcaaaggaaatgtacacctttcctgtgatattgtttttattatataggggggcagaggatgatattaagaacaataccacaggggatgtacacccacgtattgatattgtccctaatatgtatggggaaagaggacagtgtaactcccgatatcgcagagtgtgtacacccccttgtgatattgtttctgatatacacggggagaaaagataatatttcttccaaaattgcagggggtgtacaaccccctgtgatattgtttttaatatccagtgggggagagaatattactcccaatattgcagggcgtgtacacaacccctgtgatattgttcctaatatccagagtaggggaggatgacattactttcaatatcgcaaggggtgtacattcccctgtgatattgctcctaatatccatgaggggagaggatgatattattcctaatatggcaggggctgtacaccttccctgtgatattgtttctaacatccagtgggggagaaaatgatattactccctatatcacagaaggtgtacactttccctgtgatattgttcctaatatccagaaggggagaggataatattactcccaatatcgcaggaagcttacaactcccctgtgatattgtttctaatatccagggaggtagggatgatattactcccaatatcgcaggggatgtacactcccccgtgacattgtttctaataaccagggggtgagaggatgatattacgcttaataccgaagggggtgtacacacccttgtgatattgtgcctaatagccagggggaagaaaattatattaattttaatatttatggggaaaaaggatgatattactcccaatatcacaggggctgtacaccgaccttttgatattgtttttaatatccagaagagaagaggataatattgctcccaatatcagaaaaggtgtaaaccccttctgtgatattggtcctaatatccagggagggagagaataatattactaccaatatcacagaaggtgcccacccccaaggtgatattgctcctaatatccaaagataatagggtgatgttactcccaatatcacaggaggtgttcacaccccttgtgatattgtttctaacgtacagggaagggagaggatgatattattcccaatatcacaggaggtgtatactcctctgtgatattgattttaatattcggggggaaaggatgatattactccctatatcgcagagggtgtacaccctctgtaatattgatcctaatatccagggcgggataggatgatattactcccaatatcgcagaaagtctacacaacccccagtaatattgtttttactatccagggggaagaggatgacattactcccaatttcacagagtgtgtacactcaccatttgatattgtttctaatatctagggggagagaatatattactcccaatatcacaggaattgtacaccacctctgtgacattcttgtgaatatccggggaaaaagagaataatattactcccaatattgcagagcgtgtacacccctccatgatatcgatactaatatttttttaaagaggatgatattactcccattgtcacaggatgtgtacaccccccttgtgaaattgttcataatattctggggggagagcataatattactccccatatcgaaaaaggtgtccaccctccttataatatggttcctaatatccaggatattacttaatccaggatacttgtaataccctaaatatacaattgcttgaacctccacctcccaggttcaagcaattcttctgcctcagcctcccgagtagctgggactacaggggcacaccaccacacccagctaatttttttttcttgtatttttagtagagatggggttttgccatattggccaggctggtctcaaactcctgaccttgtgatctgcccacctcagcctcccaaagtgctgggattataggcgtgacccaccgtgccaagccaggaagaggatgctctatagatttccccaataagagatggctttgcagggccattccaaaatatgtcaaagaaatacatttggggataaaatactttgatttcctttagggaatgttatctattatgtgatgctataccagagtcaggttggagtcggttatcttattgcaacaaagagtctgttccgtcactgttgggatctctattttttcctcttatttcttgagacagggtctcactctgtcacccagtctggagtgcagtggtgcgatcttcattcactgaaacctctgcctcctgtgttcaggtgattctcgtgcctcagccccttaagtaactaggattacaggtgtgcgccaccacacccagctaatttttgtattttcagtagagatggtattttgccctgttggccaggctggtcttgaactcctggcctcgtgtcatctgcccacctcgacctcccaaagtgctgggactgcaaatgtgagctattgtgcccagccaggatctctgttttaatgttagtgctggtcactttgcatgaactccaaagggaagaaatataatgaggtgtgtctgaccccctgccttctcatcgtgacctgaattagtttttcaggtttgcaggggatacccttggacaagaaggggctctattcggttggttggggggattagaattttactttttgtttacaatatttctcctgaaagagttaggggctcacaaggaatttccgcgtgagcaacttatgaggaaagccatctgggaagatatgtgtccttgtgtcactgggatattctcgtttaccccaatgatacggcaatgacgcagggttgtgaaattacagctatgtgtttggggaaaaaagaaagcaggattgtgtgactacgtttccaaacttcacttgcccttagccatagtgagttgggggcctggagattctgttttctttcacaatgatatagatacaattaaatgtatagaaagcaaaaaaataaaaaggtgagtaatgaggaacctctgattcctgagtggccatgtagttacccatggcacagagccacagttactgaaggtaaagtttgctggggaatttagaaatgaatccagctcttggaggagtcagtttactggatgcctaagaaaatgcaaacaaaataagaaaaaagggtaatattcaatcccatagttattgttacctgtcatagctaaagtaaaattaaaacagagtgctggcttcaatcttgatgctacactaagcttagatttcagtgaatgtgagtctcagccactagctcagagccacctcccaaagaccaaatcatgtagggacaatagaaagtacttctgagaattgtggttaccaagaacctagtaactgttggggaggagcaaaacaaagtacagaaaccagagggtacaatctgagtgagactgctatcagcttctggaggagcctttactaaaatgaatgatgagagtaactggatgatgagagtaactaatggatgatgagagtaagcaatgtctttggttttcttttttttttttttttttttttagcagacgtctcactcttgtcgcccaggctggagtgtaatggcatgatctcgcctcactgcaacctccacctcctgggttcaagcaattctcctgtctcagcctcccgagtagctgggactacaggcactcatcaccacacctggctaatttttgtatttttagtattttctggtgagggtccaggtttccggaaacaactcagagacatatgttaagatgttatctttagttttcacagggaaccaaatatgttacgactccaatttccttggctattgttttaagttaccattaccttctcgttgatcaagttgctcatttacttctcaagcctagctagatgcctggaatttcccttgaaggaagtcaagattttcctttatctccatactggctgatggtgatcgagtaagcccctaagaggggtccctgctccatctcgagatgctgctagattctacagtgcctaataaacagctctcgcctggccgacaaagagctgcttgctctctggatagcaattccaaagtgaacagacaacatcctgtttggaagactgccactctgttagaagaagcatcaggaaaacctttcttttgagctatttataactaacagcaattgaccaagtatacttttgtgagtgaaactgacctttctccctgtaagaattctccaaaatttggaaactatttgtgagtatttttacttatggcaatataattattggcacaagctcaatcagattcggttttctttcgtaacaggaaccattggagatactcattactctttgaaggcttacagtggaatgaattcaaatacgacttatttgaggaattgaagttgactttatggagctgataagaatcttcttggagaaaaaaagactgggtatattttcaatatgctttccttttaaggtccctcacctgtggaaagtaaagaatgtcactttctgacaggctcaggaacctcaagttatgtagggatctcaagaagatgggggaattcacccagttcatacaggtgaaattgctgttgcaaagattatgaatatgagagaagtccagcatggctgacttcatctcgtgtctggcctcaggctggctgcccttgctcactcttgggcataggccaagctagccatgggaggaatttagtttatagtttaactttgaagcacggatgataatagtctctccctaaaatgaaccccttccttgctcagggactgaaactacctttgtatgacaaatgaaagcccacaagattaagattatgagaggggcctgaattctgctaaaatgcaggtgtagctgactgataacaagtcattgtcccacagcttgcctttctataatctcttgcttctcaggagtcacatggccagaggtcctgagatttccagtcctgtgacccccacccagagatggacttagtgcatgaggaccattttccacacccctatgatttcatcctcaaacaatcagcagcaaccattccctagccccctgccttccaaattatccataaaaatcctagcctctgagttattagggagattgattaataatcccagtcctaccccttgggttgctctgatttaattaaaccttctctactgcaataccacggactcagtaaattggttttgtctgtgcaatgggcaagaagaacatgttgcatggttatacaggtactacaagcacagtctgatggcaaattattggttttgcttcctgcccttgatgtttctaaacatctagtccaaaattacttgtgaaaggtccagcaaagccaattttaaaagaggctatatggccaatcactattctttctacacattattgcaaataatcaggccacggctgggcacggtggctcatgcctgcaatcccagcactttgggaggctgaggcaggatcacctgaaatcaggagttcaagaccagcctaggcaacatgataaaaccctgtctctactaaaaatacaaaattagccaggcatggtggcatgcacctgtaatcccagctacttgggagactgagggaggagaatcacttgaacctgggaggcagagattgcagtgagctgagatcacaccactgcactccagcctgggcaatagagtgagactttgtctcaaataataataataataatcagaccaagtataatgaaattaaaatttattttgcaaataaattggtcctactacaatttatccttcatagaaatgtggaaactgaagataaaaaaaattaggtttcagaagaaaactatactacacctgttattagattctagccctaaacattgtttttgaggtttttattatttacctgcaatttggtctaaattctgaattatttcctgactacaagtatccaaggaataaatgggttttctttttctttatgatagttttagttggcttctaatgcaacaacaatttttattgtaatcctgtgtgcattctattcctactattcaaattattaatgttatagatctttcattgtagtacttctgaattaaccaaaatcacagtattctgaagatgattctacaaagcctgctgtttctacaaaggctgctgatgatttctacaaagcctgctgtagtgttgctgtggcctctgcttaaaaaagtagaaaacacattgatgcagcatgttcaccccaacctccctgcctaaaggctcagggaccatcttggaagaggaaggcgcgtgagattgtaagagccgaattagggggatggagtgtggagaataaggacacttcatcttggatgctcacctgccaaattgacttctgatgaaagccagctccagaaatgtgcctacagttactactttcacctaaaccctgcccttagtcaaatccttctcttcttctaagcaatcaacttcaattccttgtataacccacagtataaaagggcttttataccattctatcctattgcatgtaagccttgggtctgggaggtaacagtgtgggattccaccatctcatctccctgccacccaaacatgcctgctcttctttaagcaatattaaatgtttgtacttcagaaatttgatttgtcagcctcttcttcagactctcagcttctttggcctttgggagtaaatttgcataggcctgctcaaaacaggatgttctgggggtttgggggtgttgttttgttttgttttttgttttgtttagagacagggtctcactctgtcacccaggttggagtgcagtggtgcaatcatggcacactgcagcctcaaactcctaggctcaagcaatccccccaccttggcctcccaaagttctgggattacaagcataagccaccatgcccagccctggacttttctttaaagacatttacacagtgtaggaattactgtgggtgcactgctcaggtccccttctccaggatgctcattcctacctcatagatgattttcctgcagagatttgacctcagctgaagggcagtcacctggtccaggtggttgctattcacctccttcctgagaacagccaacagccagggacacgctagcacagagatataagagcgaccaaggtgaggccccttctgtgctgcggtgcatgctccagagcctccctgggatcagacttaagagggtctccagccagatctggtcttcgctgctttcctcgagctccccagcgcactcctgcaatgcatcttttttttttttttttttttttttgagacggagtttcactcttgttgcccaggctggaatgcaatggcgcaatctcagctcaccacaacctctgcctcgcgggttcaagtgattctccttcctcagcctcccaagtacctgggattacaggcatgcaccaccacgcccagctaattttgtatttttagtagaaacgggtttctccatgttggtcaggctggtttcgaactcctgacctcagttgatcctcctgcctcagccttccaaagtgctgggattacaggtgtgagccactgtgcctggcccaatgcacctcttgaatcacctcctcatgctttgcttttagagaacatgatccccaacatgtgattccagcaaagattctagaaagccaaccgtgacaatcacttctgggtttagatgacccccccccaccacaagatggcagtgagcacctcatcacagaggtgctgatggtctgcagcaccgcgccaggccagaacgtgccttttacagaagaaaataacccagtagctgactaggatggtgaggagggctggtgagcactgcggtagtgagagggacactagcatcactgagatgcaagtgatggtcatttttcataggtcaaagctcaaagcaggggacagttacagggcagggcttcatagcaccagtgtgatgaaagtatctgggagtggctaaggccagcactatgccatgggaagcaaggtgggcctgaggaggaggcagcagcgtcagcctgcaacaagtgggggctgccctgcagagacctaagagtcatgttatagagcacagtgtctgtaaggccaagaagtgtggacagccaagtgtgtcaattactagacatactcaagaggagcaggaagggcagggcatggtggctcatgcctgtaatcccagctacttgggagactgaggaaggagaatcgcttgaacccgggaggtgaaaattgcaatgagccgagatttcgccactgcactccagcctgtgtgatgggagcgggactccatctcaaaacaaaaaaagaaaaaggaaaaagaaaaaaagaaaaacctaggtatacttctcaagcaaataaaaataatcaaaaccaatatcatgcccgggcacaaatttcatatatataacagatttaaatatatgagggtgattatcctctcatatctccatttttttttgtttttccatttttttctttactaaaaaaagttaatgccaatgacacacaatttttttttttttttttttttttgagatggagtctcacttcttcgccctggctggagtgcaatggcgtgatctcgactcactgcaaagtctgcctcctgggttcaagcaattctcctgcctcagcctcccaagtagctgggaccacaggagtgagccaccacacccagctaatttttgtatttttaatagagacggggtttcaccatattggccaggctggtctcaaactcctgatctcaaataatctgcccgcctcggcctcccaagattctgggattataggcgttgagccactgcgccccgcctatgtatgattttttttttaattttattttcataagtttttggggaacaggtggtattttgttacatgagtaatttctttagttgtgatttgtgagattttggttcacccatcaactgagaagtatacactgaacccaatttgtggtcttttatccctcacccccttcccaccctttcccccggagtccctgaagtccattgtatcattcttatgcctttgcatcttcatagcttagctcttgaacccttactttctgtttgagggagaagacatatcatctacaagtagatactgtgtaaacattccattgcatgactatcccataacttatttattatttgtgtttggttatttgctgctatgtaacaaccccactcccaactaaatggtgtgacaattccatgattctgtggatcaaaaattctgaaaagtcaaacccaaggagttttgtctctgctccatgatgctaaagcctccgcaggggtgaggcgaatggctcagggtgactgaaaagctcagggttggaacagctggggatgaggcctctatgtataagatgattcttcactcacaggtctgaaactatggtggggacagccagaaggctcggctcagctgggacagtcacctgagccctacacatgacctctccaacatggtgatcctgaagcagttgggtttcttacacagcatcacacttttcttttttttttttttttttgagatgaaatattgctctatcacccaggctggagtgcagtggcacgatctcagctcactgcagcctccgcctaccaggttcaagcgattctcctgctccagcctcccaagttgctgggattgcaggcgcctgccaccaagcccagctaatttttgtatttttagtagagacggggtttcaccttgttggccaggctagtcttgacctcttgacctcaggcgatccgcctgcctcggcctcccaaagtgctgggattacaggcatgagccaccgcgcccggccaaagctcacacttcttatgattcagccttagatgtcacatcagttcattttccccacacttattagtgttagaagtcacaagcccacccatactcaggggactggcacacagaccccactctcaatggaaggggtgggacaccaccattcctgctgatgggcatttgggtaacttcctgtttgaagctattaagattgggctgctgtggccgggcgcagtggctcacgcctctaatcccagcactttgggaggccgaggcgggcggatcacgaagtcaggagatcgagaccatcctggctaacacggtgaaaccccgtctttactaaaaataccaaaaaaaaaaaaaattagctgggcatggtagcgggcgcctgtagtcccagctactcgggaggctgaggcaggagaacggcgtgaacccgggaggcggagcttgcagtgagccgagattgtgccactgcactccagcctaggcgacagagcaagactccgtctccaaaaaaaaaaaaaaagattgggctgctgtgactattctagtaggtgtctttggtgagcgcctacacgtgtttctctttttctctttagtatatgcccaggaggggaactgctggctcccagataccgtatgttcagggtcacacacacttccacagggttttccaaagcccttgtaccagcacgcactcccagcacctgtgtgactgctccagctgtcccacagtctcatcagttctattgctgatattttcattttagcttaagttatatttaataggaaaattaccgttgcctctgccccccgttcctgcctgtaggagtttctcgtagctgttgctacaggtggccacaaatctgtcacttaaacccacacaaattgatgtccttatggctttggagtcagaagtgtcaactgaaggtactagcagggctgtactgacctggtggcctcagggagcatctgtgctgcttctccaccttctagaggctgctgcatccctcgctccagccccttcctgacaccactcaccctcctacttctgttatcacatcctcaccttctctgtgttcagggctccctctgtctctctcttgcaagcacacttgggattccattgagggccacccacataacccaggagaatttctccacctcaatatccttaacaactgcagagcccttttgccataaaagttaccattcacgggttccagggattgtgacatgggtagctttaggagtgattattcctgcctgtctcccgctcaccagaacttggactttctctctcaacaggagccccctgtgtgggaatagcctgtctcaacgacgccctctataaggacctgcttcctcaaaggacctcatagtcgggtcctgcccctcagtgtccagtctgccttggctggaggggctgcaggggtgtgttggcgccacctggtggagacagggcatcacagcaggtgggagcccagtagaagcacaaccaaaacatgggtaatgtttaaaattttctggctaagcgctgtggctcacgcctgtaattccagcactttgggaggccgaggtgggtggatcacatgaggacgggagtttgagaccagcctggccaacatggtgaaacatcccctctactaaaaaatacagaaaaattagctggacatgtggcgcgctcctgtaatcccagctactcgagaggctgagacacgagaatcgcttcaaccccggaggggttgccgagatcgcgccactgcactccaggctgggcgatagagcgagactctgtctcaaaaaaaaaaaaagaagaggggaggcgaggggaggggaggggaaaagggggaatttgtttggagctgagacatccatcttctcctgacctcagatatttgcactcctggttatgaagccttcacacttggactgaatacaccaccagctttcccgatttccagcgtgcaaatggcagatcgtgagacttctcagcttccataattacatgagccaatttatatatataaattgggtcctccagaaaaacagaataaattatatatataattatacgcataacttaattaaattatacgtataacttagctatatatataatttattctgtttttctgaagaaccctactgacacaaatgttgagcatcttttcatgtgcttattggcttaataacttgtacatcttctttggggaaatgtctattcaagttctttgcccattttgtaactgaactattaatatttgtctttacattgttgagttgtaaaagttccttatatattctagatactagagccttatcagatatatttctgcaactattttctcctaatatataggttgtgtttttattttctttttctttttttttttattgagacagtctcactctgtcacccaggctggagtgcagtggcatgatcttggctcactgcagactcgacctgccaggctcaagcaattctcccacttcagcctcctgagtagctgaggttataggcacttgccatcgcacccagctaatttttgtattttttagtagagccgaggtttcgccatgttgcctaggttggtcttgaactccctgcctcaaagcgatctgtcagcctcagtctccctaagtgctggaagtacaggtgtgagccacagtgcccggccatctattttcaatagtgttttttgatgtacacaggtttggaattttgataatgttcaattcatccatttttttttttttttttttggttctttctactggaccaccactcttgagccctctaatccaacctccacgcggcagccagagggagctctctaaatgtaattactctttccctgctccacctgctcaaaacagtgtcacatttgtgatttaaaacagtatttctcaaacctaatttgcaaacaaagcaggtggaactcttcttgtatgcacagcatctgatttggttggtctggcatgggtctgggagtgagcacacctaccaagcggctgctggggtaacttgcgttttccactgatgatttcagcaatgtttccggtcccacatgctcctccagaaccttgtactcccccatgaaaaggtggagtccatttccccttcctttatttatttttttgagacgaagtttcactcttgttgcccaggctggagcgcaatggcgtgatctcagctcaccgcaacctccgcctcctgggttcaagcaatgcttctacctcagcctcccgagtagctgggattacaggtatgtgccaccacgcccagctaattttgtatttttagtagagacggggtttctccatgtcggccaggctggtctcaaactcccgacctcaggtgatccgcccgcctcagcctcccaaagtgctgggattacaggcgggagccaccgcgcccggctatttccccttcctttgaacctgatcaggacttgacgatggcatcaacatggtgagagtgaccctgcatggcttatgaggctgggttacacaaggcgatgttgcttctgactggctccctctcaggatacatgcccttggaacccatcctctaagctccttgggagcccaacttagcccatgtggagacaagacagggagagaaacagaggcacccccagccctcagccagcatcaaccgccagacaggagagcaaatgcgccaacaatgattccagctgaagcctcagacagcgtggagcagagatgagggatccctgcagattgcagatgcgtgagcaaaatgcatgctgtcactgttttgaaacaacaatgtctgggggctgtttgttatgcagcaatagacagctgtaacaatgctgttactgctgtattccatgaatgactgcactttgagtagcagggggctagatcactagataagccccatggcttctgtgtatgctatttttctacttttatatccttttcattcactttttttttttttttttttgagacagagtctcactctgttgcccaggtgggagtgcagtggtgcaatcttggcggactgcaacctccacttcccgggttcaagcaattattgtgcctcagcctcctgagtagctgcgactatagatgcacccccatgcctggctagtttccgtatttttagtagagacggggttttgccatgttggccaggctgatctcagactcctgacctcaggtgatccacccaccttggcctcccaaagtgctgggattacaggcgtgaaccactgcacccagcctcattcactttctttacttggctcatttttccttgttgcctcaattctcctctaagatcactttcctgacatttcagcctgggcctgttgccttctctgggtcccctccgcctcctgtgcctcccccatctcagccttgatccctcagattatacttcctctgtccccaccctgaccatcttggctgtccctggatagggatgggtatcttctcccactggtctgggagatctggaaggacaggcctggaaaagacttggtcactgctggaaggagctcagttagtgtggtgctgaggacagtacgggtgaggctggccccttcacccaaactcccactctcttccatagatttcacctctgtggcccaggccataggattagggcaactccccttaaacatcgagtccatcctccaagctgtccttttttttttttttttttttttttttgagacagagtctcgctctgttgcccaggctggagtgcagtggcgcgatctcggctcactgcaagctccacctccagggttcactccattctcctgcctcagcctcccgagtagctgggactacaggagcctgccaccacacccggctaattttttgtatttttagttgagacggggtttcaccgtgttagtcaggatggtctcgatctcctgacctcgtgatccgcccgcctcggcctcccaaagtgctgggattacaggcgtgagccatcgcgcccggcctcatgctgttcttgaatagtgagcacctgttacaagtcgccccaccagcctctcacttgtacccccctcatctctttctccccaagagacagaggaccctggcacttgtgaagcatgacccagaccctggggccatggcatccaacatcctcattccccatgacccctactgtctagatgtagctgccaagagacccccagactccccgggcctctgtctagagtgccaagacagagagagaatgccctgccgcttgcatgctttgtggggtgtccttcccccttccctggctgctaggcgtgacttcaacgttctccccaacccccaaacagcagcactgacaccagctgcagacctggctcaggttagctaatgaggaccaggctggggatggagcctgaacccctaaaccccagtcctgtaccccaccctaatcctggggtctccactggacaaaacgaagcagcttggtttttcgttgttattgtttttgagatagagtatctctctgtctcccaggttggagtgcagtggcgtgatctcagctcactgcagcctccgcctcccgggttcaagtgattcttgtgccgcagcctccccagtagctgggattacaggcgcgtgccaccacacccagctaatttttgtatttttagtagagacagggtttcaccatgttggccaggctggtctgaaactcctgacctcaagtgatttcccagcctcggcctcccaaagtggaagcggcttatttttaaggagaaaactcccgtggaaaggaatcagcacctcctctgtcaacatttcacttctctgaaaagactctcacttccaacagaaagtgctttgtaacacaacaatgaggctgggcgaggtggctcatgcctgtaatcccagcactttgggaagctgaggcgagtggatcacgaggtcagaagttcgagaccagcctgaccaatatggtgaaaccccgtctctactaaaaatacaaaaattagttccgtgtggtggcgtgagcctgtaatcccagctactcaggaggctgaggcaggagaatggcttgaacccaggagatggaggttgcaatgagccgagatcacgccactgcactccagcctgggcaacagagtgagactccgtctcaaaaaaaaaaaaaaaagaatgagaacatatggacacagggaggggaacaatacacacaaacaaaatttagaaacaggtgaaaataattttagtaatatttttactaatactgatatgctcaaaatattattatttcaataagtaatctaaaaattattgagatgtcttatgttcttttcatcatactaagcctttaatatttggtgtgtattttacactcacagcacatctcaatttgcagtccccatgtttcaagcactaaataaccatgtgtgtccggtggctaccatactggacagcgttgatctgaaatcgcatctgtatgcatcaccagcatatttgcagagatccccatctcagcagcacacctgaggctcatctgcgaaagcacctgcaacttctctacaacctcccacatcacctccaaacacatcctcatgtcatctgcaaacacacccatagctcacaggccaatgcctaaatatcattgcaggcaccttcagagaaagcacttactaaaggggtatacttgattccacatctgctttgacctgcaaatctcccttctcctttacatacatttgcatctcatttgtatgtcaatctaaatccactggcagagcctcagatcatcatctcaaagtcaggtggatgtggggctgggcaggcctccaggtgttcctcctcctgcttcctctggggctcttgatcctcctcctcttccttgctgctctcctcctcctcctccaatatggtgaccagttcctcccgcagcgcccccatctccagccccaggctgcacagctgtcccagcagctggacatccactcggcgcaggttcccctgccagtaggaaggggacgtcacagggatgccaccccagagagcaaggggtctctccaggacctgggtgagagcaggtcccaactcatgtcctggccacagcgcctgggcagggtcctcactgtgcccatggaccctaactgccttcctgcttctcagagtgtctcttgatctctaactcttctctttgtctctccatttcattgtccctgacttctctctctctgtctcctccctctcttatctatatctgtccctgtttccctttgtctctgtccccatttattttttgtctttccatgcccctgtctctctgtctttatgtgttgccatttctctgcccctgcctttggctctctttctctcgcttgccctctctctgccctccccaactttctcaaattcagtctgtctctccatctctgttcctgctctccgtctctgcttcccacctctgtccctctcttttgggatctccctgtccccacctctgttcccgtccctcactctatgtctgtctctcggtgtctgtacatgcctctcatgtctctgcttctatctctcagattctgtttttcgatctctggccttctctatttttgttcatttccattcattctcatttcctctctttctctttcccttccaaacccctcactcaccagctcctccctgatccacagcagactatcgcaggcacctccagtgtctgcccctgcagtcctgagggtctgaccagggatttccactggggagacctccctcagggcctgggggggtgggcccagccccggaggcaccagtccagcctgattcagctgcctccacagttccatcgtctctgagctatggctgcaaggagcaggaagtagcaaggtccagggtggcctggtcccctggggagctgtgtgcgtggtggagagtaaagggcagagggagtgggatgggggttcctgggaaaggtatcccaaagtccactcttcagagagaatcagctggccttgtgcttttctttttccttctgaagtctaacctcaactctgctcacagggttcaaacatagcctcttgcagaggtctaactccacccttccctgcctgtctcaggcctgacccctcaggggcgctcagtgtctgtagatgcctggcaccctctgtccttccacctgccccccaccaccacttctccagcctctcctcagcctccatttgacctctggcttgcccatagcttggtccttgcttgtcctcttggcacgggtcatcctagggctttcccaccagtgtgcctttgggggcaggaatggctcccaggggcaccaagacagcaatcccttagctggagtgcctgtgtccaggctgctggcctagggccaagcagccaattctgctgaccctggacttgcctatgggtatattatccctgttgagggtgagggcttctgctgtggaaaagtctgggaagcactgcaggcctctctcggccttggacccttccttcagacccaaggtgcatatatatacatatatataatggtagatcacgaggtcaggagatcaagaccatcctggccacatggtgaaaccccgtctctagtaaaacacaaaaaattagccgggcatgctgccgcgtgcctgtagtcccagctactcgggaggctgaggcaggagaatggtgtgaacccaggaggtggaggttgcagtaagccaagatcacgccactgcattccagcctggcgacagagcaagactccatcttaaaataaacaaatgaacaatatatatatatatgtattttgttttttgagacagagtctcgctctgtcatccaggctggactgcagtggtgcaatcttggctcactgcaacctccgcctcccgggttcaagcgattcccctgcctcagcctcctgaacagctggggttacaggtgcacgccaccacacctggcgaatttttgtatgtttagtggagacggggtttcaccatgttagccaggctggtctcaaacccctgacctcaggtgatctgcccacctcggcctcccaaagtgctgggattacaggcgtgagccaacgcgcccagccccaagtcccttttaccatagaaagtaacatagtcacagtgcccagggattcacaggtatggggagagggttcgttattcagctgccacacccaccttcctaaacctgctgcccttccagtttcctcacgtgcacagccacgcccgtctgcttttagtttctcaatctgttggcttaaccttcaaaacaggcccaggatttgagcacttctcaccattccctctgccccatccccattcatctcttgcctagactgctacagcagcctcttttactggtcccctgcatccacccttgccctctaaggcaagggtccccagtccctgggccaaggaccagtaccagcccctcgcctgctaggaactgggccgcacagcaagagatgagcagcgggtaagtgagcattaccgcctgagctccgcctcctgtcacatcagcagtggcattagattctcataggaggcaaaccctattgtgaactgtgcgtgcgggggatctaggttgcctgctccttatgagaatctaatgcctgatgatctcaggtggaacagtttcatcccaaaaccatccccaccccacccccgacccccagtctatggaaaaattgtcctccacgaaaccagtccctggtaacaaaacggttagggaccgctgctctaaggtacattctccacctggcagaaataatctttacaaaatgtaaatccgattttgacactcccttcttcccactgtgaatagaataaaaccctaccaggcctgcaccgtcagcccctgcccacctctcaacccagtctcctatctctgtctgcaagctggttcccacctcaaggcctctctgctctagaggctacctctccctgcagcgcttttcccctagatctttgaatggctctttccttatcattcacttctacttcaatgtcacctcttcagagaggcctttgctgatggccctacacccagtcacttttttttatctgcttctcatcaaaattgccttgctgattcctttgtttcttattcatcctctcccacatccatcctctcccagcccagaatgttgacttcctgagagagggactgggtctgtcctgctcaccatggtaacctcggcatctagaacagtgcctgccatcacgtggtaggtgctcagtaaatattcttggaactaatgaatgaataattctatccacaagacttcacaatggctcttcatgctgcgatctagctttcaactccaaactggtcttgagatctcacctcagtctctaaccttgacatctaacctcttcacccactctcttacctgaccctaatttttaaaaatgacgtggtcagcttttcagccccctcattccctgtttttaggaggtagtgagtggaagctggaagaataagaaagcttggggagactgcaattgcagtcaggaaagaaaggtactctgccgggaagaacaccccatcttctcctagggaaagattgtggagtcctggggtttgttttgtttttcaattttttgttttaagagacagcgtctcgctctgtcacccaggctggagtgcagtggcgcaatcacagctcactgcaacttcgacctccccggctcaagtgatccccccgcctcagcctcgtgagtagctgggaccacaggcgtgcaccaccacgcccggctaacattttattttttgtggatataaggttgccctatttctttgtggagataaaggctcccctatgttgcccaggctggtctcgaactcctggcttcaagcgatgctttcgcctcggcctccacaaagtgctgggttcacaggtgcgtgagcccgacctgtgtctcgttttgaagctcagggagagggcgctgtgagcaatccctaaaccctttaagagtaaaaagtgcgtgcacctttaagaggacggttagaaaacgcggggcgtggccacaggagaataagttcgcgctgaaccaggagcgtgggataagaccggccccttccggttacgaaaccttagcaagatggcggctccctgggcgtccctgcgcctggtcgcccccatgtggaatgggcgtatcaggggcatccatcgcctgggtgcggcagtggccccagagggcaatcagaagaagaaaaggacaatactccagttcctgaccaactatttctacgatgtggaggctctgagggattacttgctccaaagggagatgtacaaggtgcatgagaaaaatcggtttcgagacaaggagtggatcaggccagataagtatggccatttctctcaggagttctggaatttctgtgaagtgcctgtcgaagctgtggatgccggtgactgtgacatcaactacgagggcctggataacctccgaacctccgcaggctggacatctcggacctccctgccgtgtccaaccctggcctcactcagatattggtggaggagatgctgcccaattgcgaggttgtgggagtcgactgggctgagggcctgaagtcagggccggaggagcagcctcgggacacagccagccctgtccctgcctagcctttagccctgtccccactcacgtggcttctcagcgggctgcatggaatgtctggtagctcaccacacttctggcttccatttgtcttcactcaacgtcagggtgggggagtggtgctggccaatcacaggagagagcgtgagttcccagtatttattcctggctgcccttggctaaaggtcacagctcctgtcaccctgtcaggcagccctttccatgcccctgttcaggcctggggaggtaaaggctcaggctgttagtagccgcagagagccacactcaccttgtcaggagactcttctcaaactgtccttatgtgagtgcactgccatttcttgcagggaccctgactgacacaggggctactactgacactttacagggatggttctcccccgtgcagggccgctgtgcccactgcaggacatgcagcatccttcgccccactccactcactaaaggccagcgcaccccaggccccatagtattgctggttatggatttattgactttatgttccaaattcagctttttcagttggctgttttttgaaaggggataagctttgtcagtagagggcaccgaacaggcattataggaggaaaggcgcctccttcgtggttcttgttggttgtgcttctgcctctggacgccgcagtgcatgtggcttccccagcacccagctcctgaagcaccaggcggtcagcagctgcccttggcaccctccagccctcagaagttgcgtaggagacacagcgcctccactgaggcacctctctgggaataacgttccccagcaccccaaatggatttccagtcaattcagaagcattttaccagtgaagccctcattattccagttcactgttaaagccagtaattctctatattaaactttccctgttcggtttatactccggagtataaaccgaacaggcctgccatagaaaatgcaaccacagaaataaaatggattgctttttttccctgtagtgaaaatacatttaaatctatctca

SEQ ID NO: 735335 - DNA, 188285 bp, Homo sapiens
ctccaaggctgagggatgaggagacctgctgaggacccagggccttatctttccatcccactccataggtcccagtattgactgatgctgtcttcacctcctagcctcacttttaaccttctggcacccgcccaccactgtccagttcactattgaagccctgccgtccagtgctgcagagggaaaggatgttcttctactggcctgcaatatttcagaaactattcaagcctattattggcacaaggggaaaacggcagaagggagccctctcattgctggttatataacagacattcaagcaaatatcccaggggccgcatacagtggtcgagagacagtataccccaatggatccctgctgttccaaaacatcaccctggaggacgcaggatcctacaccctacgaaccataaatgccagttacgactctgaccaagcaactggccagctccacgtacaccgtgagtgattcccccatacctctgggtgctggcggtcagttctgcttcacacacatgagattgtcaggcctgggctgtgcctgcatccccctctgcattttgtcccgtgttgagatttgggcatttagtgcaggacacacacatggtaggtaaacttcaacagatcagaattcctttcctgcatccaggccctgcagacactgatggcgggggcgggggggcctcagcagggggaggtcagtctcagccaagcaccccatgccctccccatgaacctgaccctgagaaagaccctggagaactgggtcagggcctggcctgagggcgtcctgggaacctcacaaaagcccagcctcaggactcctgactccgtgtgaccccgggaagcctgtgtcagggctggggtgtggtctcctgggcagggcttactgggagcaaggatttaccagatgtctgcgggctgtggttcctgaagcttctcatcagtgagggctcagctcccagagtctcatctagacaaggacagagcctaccactttccctgggactcagcctggagagggcagggggacaggattactagggcattggccccctgaatgaggagcttaagagatgcccttgggcagtcagtggcccaggggtaggaacagaggggagaaaatgttcctggcagcttcttgtccaccggggatcatgcccaggggtgctctcccatggaggcaaataacagatgctgttgatgtgaacacctcctctgtgccaagcttcatgtcagatcctgtgaataatttaaagttcattcacagacaaagtggcaagcctcagaccattttccatttacatattgtatggaggggaaactgaggcacagagagatacagacaccggccacggtgggcagatcgcagctggcagagtcacatgagggctgtctgcagctgctgccacgtcctctccttcatccctggtgccttactaggtgtctgtggaccttagaacagccactggttcggatgttttcttcttaggtgtctacagctcggagggggagattctggtctggagagttatgagtaaatacagaattaatcagttttttcttaactaaatcacctgcctcaacaatcagtcagtgctggggaagttcaggcctcctcgctcaggtccacaccccgcatctctggacatgaaatggcttcgtgtgttttctgatgtgtgggtatcattccaacaggaggataaaggggaggactttgctttctctccccattcacaccctgcaccagccagggcccagtgtgagacacatactccgtagttctctcatgaaggagggagggaatgaatgaaggaatgatctataacctcttcagagacagagacctggatacaagatcctaggaggttctgggcccaacgtgagacacacactctgtagttctcttatgaaggagggagggattgaatgtaggaatgatctataacctcttcagagacagagatgtggatacaagatcctaggaggttctggccacacctgttttctgtccctctagagcctaagacccatgtctcattcatctggcccgtttctcctaaatctgcccctgggagctgagtctcatctgaccctggggctgcagggctgtgggaaggttttcaggggagggatcaggcttgcgggtagtcccacacgtttgccttacaccctggagctctacctggttctcactatgaatatcccataataatcccccctatcctttctggggagtagaaaaaaagtaaatatttaaaaatatgccagagcatctgttcttcttagcaagttcagatagttattagttagcaggaataaatcgttattttaccagagcctcacctgctgggggtttatgggagcctaactgactgaggggggtgggaaatatccaactccagccccctctagccatcatgtcccacctaaaggagagaaaaaactgagaggcacttgtgacattcacagcccagggcacagactctatccaggaccacagaacccctccctccccccactcaccaccgcatcactgaacgcctgctcacccaagttcctgttgcccagtacatcatgtcctggctttcaacaaaaactacaagacagactagaggcaaaaaaaaaaaaaaaaaaaatgcagttcgaaagacagaacaagcatcagaaccagatgcagatgtggcagggatgtggcagggatgttgaaattatcagaccaggaatttaaaacaactctggggccaggagcggtggctcatgcctgtaatcccagcatttgggaggccgaggcaggcagatcacctgaggtcaggagttcgataccagcctggccaacatggcaaaaccccgtctctactaaaaatacaaaaaattaggcaggcatggtggtgggtgcctgtaatcctagatactcggaaggctgaggcaggagaattgcttgaacctgtgaagcggaggttgcggtgagcctagattgtgccactgcactccagcctgggcaacagagcgagattccatctctaaaacaaacaaacaaaaaacaatactggctaatatgctaaaggctgcaatggaaagcatagacaatgtgcagaacagacggatgctgtgagcagagagatggacaggctaagaaagaataacaacagctactatatctatctatctatctatctatctatctatctatctatctatctatctatatatatgtatatatatgctagagatcaaactcactgtaacacctggatctcagagtggttgtgaggatgtttattaggagattaaagagattaaagcagagttatacacagggcgagagctcaactgatgctatcaactagtattcttatttttttgatgttgttattggcaataaaatcaggaacaatgcagtaaaaatttggttttatcatgtacgagttctgtgaccttccttgacttactgaggtactgtaagtctcagattctaactctgcagatggcggtgatgcccctctccctcaaggtgatgtgaggatgagatgagctgtaggtaggttggtgcccactgtgcctggcacatggaaggcccctgaaaatagtcaatgaacatcatccccgctcatcagcatggagttgacagtgagggctcgctctctgtgacaatcatggaatggaaaagaagaaacaagaggaagactgggcgcagtggctcatgcctgtaatcccagcactttgggaggccgaggcgggcagatcatctgaggtcaggagttcaagaccagcctggacaacatggcgaaatttcatctctactaaaaatataaaaattagcctggcatggtggcacaaacctgtaatcccagctacttgggaggctgaggcaagagaatcgcttgaacttgggagatggaggttgcagtgagccgagattgcgtcagtgcactccagtctgggtgacagagcaagactccatccaaaaaaaaaagaaaaagaaaaaagcaacagagggaagaggtgtgacatgagaggaagaagggatttaaaggtacaggagcagggcgaggtgcaagcacctgtgggagaatgtaggagttggtacatcccagtgtgtcaagtctgagacacagaaaatggtgcaaccgtggagagcaagggagtcagctatgaggacagcccaacagaccacactcaggctctggagcatttccttcctccctgactatgcccctgccctgcaatgccccttatggtttcccttggaacaaacttgggccttgtcccctttgccttcccctttctgcagaaaacaacgtcccaggccttcctgtgggggccgtcgctggcatcgtgactggggtcctggttggggtggctctggtggccgccctggtgtgttttctgcttctctccaggactggaaggtaccgcagcttttccccagcctcctcccacccctaggctgaccccagtcagggaggagggagaccccgccctgtattcagggccaggctttccgcatcctcccaaggaatccttccctctcattccatggctcctcccttgccagctgctgatcctaggctgcctcttcctttatgaatgtggcacagttaaggttgcacccctgagtgctgtcctagttccctaacacagcaaagccacagctgcctggagggaggaagggagggagggagggagggagataagacgggagtgctcagaacctggtaccttctgctgttcattgaatttacccacccagtgaggagggatttgcaggcttgagatccatggtgggggtcctgggcatggtcacgcagtggggagtggcaaagcctggacaggctgggtagggtcagcaccccatcgtgattgatgtccctgaggtgtgagatgggagaacctggacctcaggacctgctgtcctttatgtctcttgccaaggggtggagagagagaggacaaggccattgccccatttcagcatctccaggcctgaaaggagggtctggccatggcagggatactgagttctgggagaatatgatacatgctccttgcctccccatgcccccagctcccccagtgtcctgcacacacagccggccctgctttccctctggggccttgacccttcctctcaggcaaacgcaggtggtctgattccctccctgagtcctcagtccctttcctgggtccctgggtcaatgttctcctcacccggcatctgcctgggggggtccttcctctctggccaggacagacgtgactgcttaaggcctatcctcagctccccgtcctcggccgctcctaccacgaaactgatggagacaggaggccttcactccagtccttgaaaatggagtcccttccttgtcctttattctgcccctaaacctgtgatttctccctgcaccctcatgaataatcctgacctttcctagggccagcatccagcgtgacctcagggagcagccgcccccagcctccacccctggtgagtgtcccttcagcccaggtgtgggagcccctaggcctgccctacggtgtccactcctgccagtcaccccctgggggcctctgaccctttctttggggctgcaaggaggatgtcaggaaacatgacacaggggaccccgactgtcttgttcagactgatctgtgggctctgggtcgtgggtcacctcctcgacctcagctgctcaggtctcccctgggaagaggctccctctccctgattctctgggagctgaggacccctacactctcctgcaggaggggcccaggctctcctcccaccctgctgctcactcctgtctctgtccccaggccatggtccctctcacagatccaccttctcggtaagcctgttccctccccagcccttttctactggggtcccaacagtgcaggctcagggcagggggaccatcaaccccacagcacagcactgacccacctttccccagaacagtcaggtcaaagtgagtgcctccagccaggatccgggcctctctacagggccaggaccacccacgccatgtgctgacccctccccgggaccctctacacctgaggagaaccctggagtccagcaggtgcagaatggacactgggaccatcagtcagaggcccacattaacaagggtgcggggtgggcccagccaggacaggggtcagggtgttgtgtccacactgggaggctgagctcaggggcagagctggtcaatcctgaggggaaatgagtggaagtggaggcagggaagtaagtcctggccgatcagagacaggaaccttccaggctgggcttccgtgaccctccctccctgtcccctgacatctcctctctcccctgcccaggcccctctacccagccccagaacagccactcccatctatgaggtgagtgtgggccatggatgttctggtcccgcaggctccaggggacccaggatctgcccccaccagcacctggctgagctcagattcaggaaaatgcagtgaaaatgagaacaggtggtggtgagcagaggagggaggggcctgggaacagggaccccctgagcacagccaggttcagccccagagaagccctgggtgggcccagagcctgggagatgccagacactgttctgagaaggctacaggggttgaggcctcttctctgtttttacaggaattgctatactctgatgcaaacatttactgccagatcgaccacaaagcagatgtggtctcttaggttcctctgggagctgctcttgtgggttgatggagcgtccccaaagctcccagccctggggacggggaaggacatggagcctgagccagagaaccagctctgagtcctgaggagacacaggcctggggacagggagggatgggagtccctgctgaatatctggagaccctgacaggttgccctgggctctgggtgggccgggacaaaggcctctcatcaccacaggaagcgggggcttgcaaggaaagtgaatgggcctgtggcccacccggggtcaccaggaaaggatctgaataaagaggacccttcctctcattggctctttttctgctcacgggaacttagcagaaactcacctgaaactccgtgtccattctctcccgggtcacacagggaaaatatctccaccttgtctcaaccacagtctctcttccctgggaggcagaaataggggttgggagtcaggctggggtgggccctacacaggaaagggcaagattcacatgagccctgcccagccagccgagcgctcagctgtcctcacactaccccagggaccaaggccatgcacagccccagcctgggtccctctgtgaatgcatgtggggtctcaggagcacagaagatggggccatctgatgtccacaaaaggtgagcaatgcgggagcaaccatgggtggtataggttgcggctgtggcccctacgcagcctccagtgtcctgacccctgctgccctcttcacccaggccctggaggcccagtctatcactgtcctccacaaatgaacttacctgtccccaaatccaggatcctgtgtgcttatacctggccactaggttctcctctgtcccagtggctactgctcaggacatctttatccctggtggggcacagagaggggctgtcagagcaaccaagattaatacagacgcataattcagtccttgagcactacccaggactctggcccctcattgctcatcagttcccactttaccccctggcatggatctcactgagcaagccaactctttacacaggagcatccaggtcagaggtgcaggactcccccatctaaagctcatgcaggctcccatggcgatgggacaacctgtctgctcctctccctggcccacagccctatctcgcctgcagctcctccacacacctgggacagcagttctcagcccttccctgagggcccctggaagggtgatgatctcatataggttcacttgaaccaggtgccaccttcccacaagtgagctggtgcctgcactaaagcacagagccacagttcccaagagtgttctgccactgccacaggtcccaagagtgttctgccactgccacaggttgttcgtcctgagatgagaggtaagaaaacaacccgcaatgggttgttttatatcgggatttgcatcaggatttagctctaaatgacccctgatcccacctgcacacagcgtcagatgagacaaggtgaggcctctttagttttctgttgaggctgtgacaaattaccacaagcttagtgacatagaaacctgaaccaaagtgcccacatggctgtgttctttctagaggctccagggaagagtgcatttcctctccttttccacctcctagaggcctcctgcaaccttggctgtgtcctctttctccatcttcaaagccagcagcacagcatcttgaaactattctgtgccctgcttccatccccacatctccacctcctcccacctccctctctcacttaaaaggaaggagccttgtggttattttggacgcacctgggataaaccacaacaacctccccatctcatgatccttcctttaatctgtaaagtgtcctttaccacgtgacatgtccacagatctggggatgaggatgtacacatctttgagaggcccttgttctgtccatcactcctctcaaggccatcttctcatcatcgttcactacaaactacacatgggcacctggatgggttcatcatgactgtggcgtcagttcctgcattaacatccccagcaccctccagatcctgagagagggagacggagggctctccatgcccctagtacctctccaccttcttcttggtgacatgcttagttgctaagaataacagaaagcggaggtgactgaaagatcacaactcaccggcccttcaatagttcgtggacatcagcaccacggacagtgactcagtgaggctaatttccaggtggcagcagggagcatgcagataggagggaactgcaggaaaagctgcccattctattctatatgagaaagagtgtaagaaagaggaagctattacagggataatgctattcttctctaatccataaattgcgaaacctttgcatgtctggatatcatggtttttagcacatctgctgccactccctgcagggctgattgctgcatccaggatgtggtctcttggggggctcacagcctgctttggcctcatggtgagtctccctgcccctgacactcaggccactgtctctgcctacaacatggtgggaaccttccatgattaacgtctgattctctgtgcctgacctttgaagcacatccatcactcagcctggagcatccgctgagctcagcatcctgctcctccatccccagctgagcccttgaggagatgcttgagaggatctcctgggctcctctgtgagctcctccaggctgagccttgtgcttggtgtcagaggcctttgccatctgcttgttctttccataggcaaataatcctcctcagggacaagtggggcctgaagatctgtctgaatatctatctatctatctatctatctatctatctatctatctatctatcatctatctatatgtatgtatatatgagaatgctttattaggcaaaactgcatactatgaacatgctttaaaatgcaacaggatgagatgtgaagacataaagaacaagtgtgtagtgacacatggctatcagaacacactgaagaatccacaccgcggccgagagcagtggctcacgcctgtagtcccagcacttttggaggctgaggcaggcagatcacttgaggacaggtgttcgagaccagcctgaccaacatggtgaaaccccatctctactaaaaatacaaaaaatttagccgggcctggtggctcatgcctgtagtcctggctgttcgggaggctgaggcaggagaattgcctgaacctgggagacacaagttgcagtgagctgagatcgcaccactgcactccagcctgggagatagagtgaggctccatctaaaaacaaaacaaaacaaaaagaatccacactgcttccccgcttcactttacccagaaaaggaatgttctaggccacttcctcttcagcacacatccccagggaactaaaataggttcacagtcacccccatcttcctcattcccatcacctcttacccacagaggcatctctggtcctacagatccagccctgccttcaagaggcacaggtccaacccatccagtgtccctgctagtcacacacagcactcagggtacaatggagggcttctgtgctttggatgggaacaaaccccacctcacattcccacacctgagaagccaccagggtcctctctgtcctgtcctcacactcaatgtctgtcctgggtcacccttgtcatctctcctggaaataggcatggctcctgacaggtaggattgaggctttgtcttttcaggagtccctcccactctgagcacatgaaactgctcagctccatgcaaccctctctcaccaggggccttgttctctgggtccctgaatacctgggtccatgccatgtacattttaagaaaaatgacagtgactctcaccctgacatcctcacccaaggcacgtgtctgacaagaatcaccaggtgagatacctgtggctccacacacctgaggcttcactgcgcaggggtgtcctcatccctctcctcccacccctagggacagtaagcaccacaggctgccttggaccaccagctccccctcccagacacagcctcagatctatactgacatgctacatggagaggctctgatgaacagcaggtattaggaaatcccaccgaaccaggtgccacttgcggccccactcctcctcatatctgtgactgggacagacacacataacacacctctgttcaccgcccagcccccaaggtcaatcacagtctgcttctcccctagatccactgctccccatgtcttccgtcctcagctgcatcctgggtggcctccttgctgttcttgtaccccagaggcaggttccaacctttgtgatgttgcctgcaatgcccaaactttcccttccccttccccttcccttttcccctcccccttcccctccccttcccctccccacccctatcccttcgtcttcccttgtcttcccttcccttccctataaagccaaacatacccatccacctaccttgtggtcaaagtcatcagcctcctgctccactcagtgttctctgaccctgcatatggaggtggtggcccctcctagaacacccaccactcactgtcagccttgcgtggtaatcacagattttgcaggggttacctgtgttcaggtgtgtcacctgtggaaccagaactcttggaaggactggcagagggagctgcttaggatatctcagggctcctggcatctggtctaccacagggctattaacaacagcacttagggacaaggtggaggatggacggttaagagggtaaatatggatgatgtgtgggcaaagaataggacacaggaacacatgcagtactcaaataattatgccaagaaaggtgaggacatggagatggacattcccatatacttctgatgggactgcagtttagtccctacagcaacattgacctcatcatgtttaacgcgcacacgctctgaccactatcctacttctgaaggcctccctgtgctgtgagctctgagaaggccaagcttgcctgttctgtctctgctaaagccagagaccagccaatagcccagcacagggtacttcataaatacatgttgaaggaatgagctccaggaacagtactccacatggtagagatgtgtgtatgaggatgttcactgcagaaggtcatgtcaatgtgacaagtgacgagcagcctcaaatccagcaacaggggtgtgggtaaaagatcatagtgtagccatgcaatggaaccaatgaaaaaaccacaattagagcaaatccacatgtattaataaaggaggtgccctccatacatgctgcacctaacagaatgttgccaaataagaatgaaaaatgatgatatttgggctgtaaaaactagaagtcagctaaataagaatgcatcgaaagtatttgtgaatgcttacaattttataatgccttggcatccgttttggatggaagttggactttctcataccagaagcagggctcagtcacctttgaaatagtttccagttctccacctccttccagttcctcagtgtgattgatcagatatctgatttatacaactgcctcctggtgacctcctccctatgggacttccggatacagcccgtatgactgccccactgaccccacaccctgcctgctgcagtgaccacctctaattacctggatctcatgtctgcttgcattaaatccaccaattaaaactccctgaggacaatctgtttgaataatattctgtaccctaataaaggccttgacccatgggttccccctctgtcctccccatactgcccctgacctctgtgtgtgtgtgtgggtgtgggtgtatgtgtgtgtgtgtgtgtgtgtcctccagacagggcctgtatcccccaggacctgtaagtaataaatctttattttcatcttatgtctctcgcaatcattggcaagagctctgcatcttaaagatcgcaaatttaagaaattggtgtagtcggcacaatagagtacctcttctgtttagcacaagatatctcggagctgctgaggcttttaacatcctcgccggtgtggctgcctcactggtgaggccgttctgttcagtgcaattcagttgctccactgtgtgctgctgtgttgctgctgtagagtgctgccatgttgttctccccaaattgttaccgagtaggaacctgtaatgtgctcccaaggtggtctaccccatgagaagggggattctccatctagggcaagggctaggtgtgtttctggaatcctaatagggaaggcatccacagagggtgaactccactcctccttagagtgaggagtgacatttcccatttattttccccatggaggtgccatgtattgactttttctttcactgtcccaaggttgagccaaggtgagctatggagaccagggcaagataccatttctgttagcaaagcaaatgggtgacaacgtgtggagaagctgtggttctcctgatggatatagcagagtgccatttagtaaaatcttgtcaggaggctgcccctggttagaccggcagtgtctgtagtcactaaggtggatgcgaattttaggccctgggccatggataatccctgcagacacagccgtggcttcatgtgatggggcaatcccgggctagtggctcccttgtttctgcatttcttgctgtggttgcacaatcaacacctcaggggttgattgggtcaccttggaaagagaaacagctgcctaggaggctggtgcacatggaggccaccctcaattttattctgctaacaagttgtaagattaaaacaacagggggctttgggtaccatcaggaacttgtcaagtaaacatccaaagacagaaagaagaaaaagaaaaagacattaaccgtctagaaatacaagccattttaaagattttgcttaaaagatgcgcttgggctgggagcggtggctcacacctgtaatcccagcactttgggaggccaaggtgggtggatcgactgaggtcaggagttcaagaccagcctgaccaacatggtgaaacctcgcctctactaaaaatacaaaaaattagcagggcatggtggcaggtgcctgtaatcccagctacttgggtggagaatcgcttgaacccgggaggcagagacggcagtgagccaagatcgcaccactgtactccagtctgggcgacagagtgagacttcatctcaaaaaaaaaaaaaaaaaaaaaaaaaagacgggcttgtttcgtcgttgtggagtcatcccagagagaggctactccctagagtcactgaccacctttcctcctccatcttttcctcttatcattctagagacagaaaacaagaatctcagctttaggtggctaacctcaccccccaagaaaagaaactaccactttgattgactacaaatccaagaaaaataaaagagaaactttaaaaagtactgagcaaaccacaggtctagcaaacataatgctagccctaggttacttattcatttacaacaaacccctagatataggaggaaaaaataaaaggtaattaaatatatacacatacaatattttaatataaatatataataaatagttaaattatgtatgtataatatgtaactaaatcaaagtaaaatttcatactttgattctattggaaattcaaaattcatttattaacttatatattaaggaatttatgtaaaaaaagatttttaaaagggcaccaatttgcttttgtgtctctacaacataggatctaatttaactttacatttgctaaatacactaattgacaaatattcatggatttaatcaatactggggctcaaattgtagccacacgtgggaatcccataaatttaaacactctgtccctattatcttgagaagaaaactaaatataaaattgaaaaaaacaggtatgtctcaatttacctgtaactttgcctaaatttcccggagtcatatacccattgctgtaaaacattctctattggacataggtgctctgagacaataaataaaatagaagtgtttttggtacttagacattggcttgacaaaatgggatcccatgaaacctcagttaagatagtgaatacggcccaatgtgagttgaaatggggcctttaaggattaaaacttattacatgaaacctagtaagtaatggggtgattatccatactgcttctccatttcatagcccaattttgacagttgtcaaatctggaaaaaacaaacaaacaaacaaaaaaacccctgggaatctgttgcctcacagagacacaaagtagacatcaaaattgtatatctcagttccagttccaaaatggtggcatagaagcaagctggctttactccttcacacagaaaaccaaaaacaaatatacagcaccaaaattattaccagatatattccagaactcaaatatgaaaatgaaacagttttcagagccacagagaagtgaaaaaaactcccgacagatgacaaaagaatcagatttccccatctgtaatgtccctccctgccccattctgcctggtaccaggtgtgtggaaaattttaccccaactcatggtttctacactgggaaatgtaagatcaatgcgggcaaccagtttctgcacaatcctgggttccctgtccctgccttaacccacaagaagcattgtgagtgcccgaagggagaaatttccctgaggacagtcaaagagtggggaggcaggactaccatctccttccctggaaactctgctgtgtaactcagccaagggagacatgaaatcagactggtgtttcagcagctccatgttgtagtaggtttgtttcacaggtatcctgggcatggacatctagccagctttcccacactgccaggatatcccctttgggacctccctcagttaggaagggcacactctgatcatttactagggccaaggtaaaccctaaaggtaacttagagatgaaaaggaggtagtgacctagcagtaaagaactctaagaaaatctatccaataaaaatcaaaacaagccagacaaagactaaaataaataatgaatccttcaatgtaaagacctggacttacatccacaagaaacagtaagcaggtaaccatgatctccccacatggacaaagtgaggaacaagtgactgatcctgatgagatggtgatgtgtgagctctctaatcaagaattcaaaactgcagttttaaggaaactcaatgatcttcaagaaaacatggaaaagcagttcagaaatttatcagagaaatttaacgaagggattgaaataatttaaagaaaacaaacaggaatcttggaattgagaaatatatttgctgaacaggaaaatttattagagtctctcaacagcagaatggatcagaggaaagaatcaacccaaataagactcccccaaggcataaaataatcgaattctcaaaagtcaagggcaaagagaagattttaaaacagaaagagaaaagaagcaaatggcataaagaagctccaattctgtggcaacagattttcagtggaaatcatacagaccaggagggagtgacatgacattctcaaaatgctgaaaaaatattgacatttgagaatactttatccagtgaagttatccttcaatataaaggagagagaaagtttcctagacaaacaaaagctgagataattcacaccatcagactagtcttcctgtaaatactaaagggtaaatactaaatacttcaatgtgaaagtaaaaaaaaaaacactaacatgcaaaacaaccacaacaacaataacaacatttgaaggtataaaatccactggtgaaattaagtacgtagacaaacccagaatactcaaatagtaattgtggaaagtaatccaatcataactctagcatgagtctcaaaatataaatctatcaaaaacaataatacattttaggaggccaaggttggcagattccttgaggtcaagagttcaagaccagcctggtcaaaatggtgaaaccccatctctaccaaaaaatacaaaaatttgcagggtatggtagcacatgcctgtcgtttcagctatttgggaggctgaggcaggagaattgcttgaacccaggaggtggaggttgcagtgagctgagattgcactactgcactccagcctgggtgacagagggagactctgtcttaaaaaaaaatagctacctgtttggagaaaggtaatataaaatatgtaaatagagacaaagtcaaaatttgcaaaggatgaaattaaagagtagagtttttttggggggttttctgtttctattattttatttgtgatctaagataagttgttaccttttcttctcttgaagatactttgttatatctatgtttttggaagtcttatggtaactgcaacgcaaaaaatctatgatagatccactgaaaataaaaaacaatgacttaaaacatactaccagagacaatcaaccacaaggaagacagtaaaaaatgaagaaaggaagaggggagttacaaaacaaccagaaaacaggcaacaaagtggcagtagtaagttcttacttaaaaatattgaacactgaatataaatggactctattctccaattaaaaggcatagagtggctgaatgctgcctatatgctgcctacaagaaaccacttcatgtaaaaagatacaaatagactgaaagtgaagggggtggaaaaagatatttcatgcaagtggaaaccaaaagagagcaggagtagctatactgatatgagataaactacaaatcaaagactataaaaagagacaaagaaagtcactatgtaatgataaagcgctcagttcagcaagaggagatgccaattataaatatctatgcatccaacacttgagctcccaagtctcccaagtatttaaagcaaacaatagtggatctaaaaggagagatagactgaatacaatattaattaggggactttaacaccctgctctcagcaatggccagatctttcagacagaaaatcaacaaggaaacttcaaagttaaactacacactagatcaaataggcctaactggcatttacgggacatttcactaactatctaactgttacagaattcacattattttcatcagcacatagaacattcttcagaacagaccacatcttaagtcccaaaaccagtcagaataaattcaaaaaagtttatatcacatcaagcatttgttctgaccacaatggaataaaactacaataaatgaataactttctggacacatacaacctaccaagatggaagcatgaaaaggcagaaaaacccaacaaaccaacatgaaactgtaacaaaaggaaaacccaggaccgaatgacttcactgctgaattctaccaaacatttaataagaactaaaaccaattctactcaaaatgctttaaaaaattgaagaggatggaacactttcaaactcattctacaaggtcagcattatcctgataccaaaaccagacaaggacaggacaaaaacaaacaaacaaacaaacaaacaaacaaacaaaaaaacactacaggattgcttgaggccaggagtttgagatcagcctgggcaacatagtcagaaccaatctcttaaaaaaaaaaaaaaagaaaaaaattagccaggcatggtggcatgtgcctttagtcctagctactcgggaggctgaggtgagaggaccaattgagcccaggaggttgaggccgcagtgagccatgtttgtgtcactgtactccagcctggggaacagagcaagatgctctctcaaaaacaaaaagcaagctgggtgtggtggctcctgcctgtaatcacagcactttggaaggctgaggtgggagaactgcttaagcccaggagttcaagaccagtctggacaacatagggggactccatctctcaaaaacaaccaaccaaaacaaagccaaaaaagaacataggccaacatcactaacaaacatagatgtaaaagtcctcaataaaatattaacaaaccatgtttagaaacacatcaaaagagatcattcactatgattaagtgagattcatcccagggatgccagtatggctcaacatatgcaaatcaataaatgtgatccatcacattaaagagaaccaagaacaaaaaccatataatcactccagcaagtgcagaaaaggcatttaataaaagaatgggttgagggagtggagcccatagtcagagcagcagtggtctgggattttggaagtagaaagaagggcagcaccactggccaggaccaccagggaacacccccataggccctgggtgttgtgctccagggagggttccctctggagttattaatcttggtgtccactttgcccagctgcccctcacagggtcagggaggatgaagggaaagcttccttctaatgaaagttcagggactcacagttcctagagcctgtagggagaggaagatcttcgaggaagagcacctgggcattggggcgtttgagaggaagatctatgccaggtccaagtggacaacctgtggactctctctccagggacatacgggtatctgggaatctcctgtagcttaaagaggtaaagacctctccctttagcctgaggactggaggatgctggttcaggtgaatgagtcctgcaggggctggtacaggcctggagggtggtggtgtccagggccttgggttcacccttagcatgattcaggccgggcggtgtttcacatgagcaagagggcctgggttcattgcttcaggacaatggtgaaatctcatggtggaagaaatcttgtccttgccagtgcccagctttcatttggtcttggcccagagtgtcctccctagagaagactcttgtcccttcttcacactgcccttcagggatatgccagccttatgggataagatggggtggagactgtagatgtgggtgggaatctctccacagagtgctccttctctcagcggttgcaccttgtctcagggcttcagcttgaaatctgggatctccaagcccttccctccccagtcctggccaggaccacatgggcagatgcattgtgtgaagtgcatttcatttggggtgtcctctctgcatggcaccctcccgttgattctctttgcgcatgtcagagtgcaggcaccatccacacctcctgctggaggagggacggagctgttgactcctgagagctgatcatgtgttcccaccctcacacacaatcatggtccatcctctgagggacatgtgttgccaccactgtggagatggtgcaactgacagtaacaaacagtaaaatctggtactgaatgggaccttaagccaacaatgacaatgtcattccaaggtgtttcatttttattgattcaatgcaagtcacctgatttcattgactattcacaatagctcgataaagtaaatgcatcatcaccaccactttaaagaggaaaaaggtgcttgggcagtttgtgactactgtggtggctgctgcattgctctctggtaaagccaagtaggtggtgggtgcggcctctgggctgggatgatccaccctcctggtggtggcaggggagccaagctggagccatggcctgtgcagtggtagcagctgaactgaccgctgctgcaggatttgcaagctgttacattttgcgaagccatgaagcacataaaacctcaagtagaacaagtgtttcaaagtctaccaaaatctgccttcagagattattactacagaggtggatatgaacccaaaatgacaaaacgggaagcagcattaatactagataatgaatgaacactagtaatagtagggtaagccctactgccaataaagaaaaaaataagagatgctcattaacatgttatgctcttaaatcacgcagacaaaagagggtctccttatatagtagccacaatcaatgaagctaaagatttactgcaagatcaagctaaaaacagtaggtgtataatgaatttttaacttcatattagtttatgtatatgaatatcaagtttttataataaaatgcctccaaacaaagaatatttgatttagggtttaataacttctaagaggggactcagatgtttcctgtttcacagtcagtctgagagggtcatttttcctggagctgacctgggtggaggcctcacactgatactccccagcatcctctctcctgatggggtttatgctgagcatacagtggccctgggacagctccattctctccatgagtcacagacgctggtcatggaagatccactggataaggttccagagtcatctgtggggcaggtcaggatcacaacatccttttcttctgtgactctggtgttgctgactcagatggggtcggagccactgaccctgtggacaatcagtggaggtgctcaactgaaagtgggctgagggcacgtcttctcctccatccctgggtccttaaggtaactgtggaccccagaccaactgacacaggagctagaaagaaattatttaggaagttagtgagggtaagagcgtccttggcaaggtttcccctttaacaaaaagcagcccaagataattccttttctaacaaagagcagcctgaaaaattgagctacagatgtagatgagcaagatggaagcttgcacaggtgaattccagtaggtgtgccaatagaaaagggctgcctggaagccaggtatgttcaacatggagactccatcctcccttttctccattaccacatgtacagtaaaaaaccaggcaacatggcaccggccaggtagacaatccatctgcatgacaaaagatcagagtggggcagccagcaaatggcacagctggtctaaacaatctttcaccccctgtataaatcagacactgcctcctgaagctcatctataaaaccttctgcatttcactatggaagtggcaacccattttccccaggacccctctctctgtgcagagagctcttctctttctttcccctatgaaacttccactcttaacttcactctgggtgcctgcatcctagttttccatggccatgggacaatgaacctcgagtattaccccagatgaatgatgctgtttcacaatcactggttcagctcccttcttcttagggtttcacagctcggtggggagaataccacgcctcagtggtctggggagtgaggaacaaatgaagaattaatcagattttacttagaacgctatcacctgcctcaaccatcagatccatgttgggaatgtccaggcctcctctcttagatctatacccacttcactggacctgaaatcctgtgtttcccgatgtgttggtgtcactcctatgagaggataaaggagagaactttgctttctctccccactcacaccctgcacaagacagggcccaatatgagacacacactcgctcagtagttctctcatgaaggagggagggagtgacctcgagtgattctgccatctgtagtctgtgtaccctggccagtggctgtatcttcatatgcctcagtttcccctcagtaaaataggacacacaatgagaactaaaaataaaattctaattccccagtgaactgaaaggatggcctcttggccaagcggatcccagagttcctgatcatgacaggatgggaggttacacctcattacagcccctccctttggaagtttagaggtgacaactgactagcattaacgctaaaatcgagatcatgagactgacagaacagactctctgtggccataagataccaaattataaactcaacctaaggtcatgcaggcaagggctaagccacactttcctacatttaaagaataagctatgttctaacacagaattttctttctctctagcggctaaagtaacactagccttcgagataagcaatattgaaatgatcgcggctcatccaccaacactggctaactgacccctgttccaacagccacaactacacttcaattggacaggagactgatttcagtaactttctcctaataagagaccactgagcatggcctggttctgctggtatacagacacggtgcactgagtaccataatgcttgtttcatcttttgatgtataagacctaatttaatacatttaaatctgaattctccaccccaaagtgaacatggggtgcatgtagcatgcatgtttgttgatcacgcatgtgcgtgtacttcctttgtgagtatccatagctccacctataacctgttgaatatgtatacctggccaactcattcagcataaatctatcttccacattcccctcccttgaagtgcctgctattggtctctgctggaggctgcatcttctaccctggggaatggccagcctgcaggctgtaaccctgtgtaagaaataacctggttgggtgcagtggctcacacctgtaatcccagtggtttgggaggttgaagtggtagaatagtttgagctcaggagccagagactagcctgggcagcatagcaagatcctgtctcttaaaaaaattttagggaggagagtgaggatcagaaaaaatacctattggctattatgcttagtacttggatcatgaaataatctgtataccaaacccctgattacatatataacaaacctgcatgcgtatctttgaacctaagataaaagtttgttttaaaaactatctgggtgcagtggtgcatgcctatagttccagctactcgagactgaggtgtgaggagtgcttgagctcgggggattgaggctgcagtgaattatggtcccacctgtgagtagccacttcactcaaacctgggagacagagcaagaaccggtctctaaaaaaaaataaaaatagaaaaataaaatgaaaaatatatgaaataaagtctcctttccaaacgtacagatctccgatttttctgccaacaatgataaatggtcagtggcttgccatgttgtctgtgaattacttttaaaatattcacgatcacctgacctaaaggttggtaccaaggaaccgcctgaatacaccgtctctgattatttgcctccaacagagtgttccctgggcctgatctctggtggacaatgagctgctgggaacatcctctcttctctattcctcccctggggatgctgaccttcccttggagtctcctaagttccccagggcagtcggctaatgtcctagggagcttacctgtcttctccataccaagtctcatgtgaaggacgaggctttgcccttgcccagatgaggctctgggggctgagccctggctggctaccagctgcaagagccatggcccttggacagctggtaaatccttgttcccagtcagccctgcccaagatgcctcaacccagccccggcacaggcttcccagggtcacatggagtcaggatcctgggacaggggactggacaggggtttccagggctgagtttctgaacaggggcttcccaggggtcccctcactccaggatctgacatggtcctacaaggaacgtccatggggaggggacccaggagggggaactgacactgacctccccttactgagcctccccccaaccccatcagactgtccttcctctgtagcaagtgcctgcagggtctggatgcaggaaagaaattctgatctgtggaagtttgtctcccctgtgtgtgtcttgcactaaatgtccaaacccccaaatgggatgtaatgtagagggggacacaggcacagcccaggcctgaaaatcctgtgtgtgtgaagcagaactgacccccaacacccagagctcatgagacatcactgtgtacgtgaaactggccagttacttcttcattcacaagatctgtttttatgacttgtagggtgtaggatcctgtgtcattgttggtgacattctgtatcagcagacatgtattggggtatattgtctctcagcctctgtggcaggtcctggggtaattacttgagttcctagtacatatcctgtaattcccctttgtaccagttgtagccaagcctaaggcagattgtgggtgagtggaagaatctccttgccttctgcagcttcaacagtgacttgggcagtggtaggcaagttccagaaagttaaaagtgaggctaggagtggggagagagcatcagttaatactgggccctatgcattgaggtggaaagatggggccctaggtcctggacaggtctcttcatccctcagccttggagtgtgtgtgtgtgtgtgtgtgtgtgtgtgtgtgtgtgtgtgcgcgcgcgcgcgtgcgtgcgtgtcctactgggccaaggtcagcagcatgacctcccttccttcagtgcctctgaccttggcatttccctgtttggagtccttttccccaggggtctgcctggctccctccctactgccttcaggtcctgctcacattagggcatccttgggagaccccttccctgacacctctagagaccctgggtcttccctttctgacctttcgctgctgtgttccctccagggctcttgtcaatacttgacctcacattctagatacccttgcatgtctgtcttcctccctatgagagcatgagctctgtgagaacagggacttgtgtgatcttggttgcaccccagtgcctgggacaggctgcggactcctgtggatgagctcatgagtgttcccagggcccttcacaacgtgggatttattttccaatggctgaggttgttggctaagagctctgttggagttcaatcaggctggtgggaaaaatattagagatagttatagagatagacacaaatcttcttggaagaccaaaaagtttgcataactttggtaatagatctgactgaaggtggtccctttacctttagttaaacaaattaaagtagtaacaaaggaaggcagagtagtttgtctagccagcttgtttactcatgtgatcttaagactaaccattgatgtgccacaggtgcttaattgctttctacttgggaagtccacaatgtcaattaccctctaacggtgttgactcaagcctttgttaattaatcttactgaataaatatgagtctcactagctgatcaaggccatggtcacaactgtttataggactcagcagggagtctgtaagcggccctgacagactcagctggactggcaaagcaaaatatgtgtgtgtcagtgtacactattcacccgtcccccacagctggtgcccctatatgaggagtgctgccacagagctctgtttagtgtcccttgttttttttcttgagtattaccccaacttaaattgtgattattgtcatctgttttcaacattaactgctcagtgatgattcacttggaaaacattaacaatcgagattgtttcttcactaacaacctcagattatttagattttcctgttgtaatcccttcttcctgtttagtgtccaacagaagccctctgtccctctcaggtccccgttctctccaagaaaccccagccagtctctgtgctccctcctcccatccactcccagggagccctcccctcacctgtgagcagaagcgcctgccagggatgtgcactctgtgaggaggggctgagggaggccccatgggctctgctgtctgctttgtcctcctctgtggagaggagcttgggcttcagaaaataaggaggccagaaagtaaggaacaggctgagaaataatggggatgtgtcgaaaggtcacagatgccaacatctttgtcctatgcaatattatccataaaattacaggtttgagatatgcttaaattttcttctaacatgcattaaaataaacatataacttttaatagttatattaaattgtatttaatataaattaaatgctcttgtcagagctactgtgactgtcagctctgctgtccttcctctctctgtgctaagcctcctcccagggcagaagcacttcccagggccaggggtgggggcggggaaaggtaagtggcaatgaggatctgcacaggtagcctttccgcctcctcccctctcagtcctgcctccttgtcttcttttcctctttttctccaatctacatttcagttccttagaccacgctgtgagaagcaaggcttattgggacccccatcccttaacaggatgacctgtgctccccataagtgacctctgctgtgtctagggattggctctgtcagcacctcacagagagtccctggggcccccaaactcagtgttattttctctatgacacagaaacccctctgggtatgcaaggttttcctcatgttttctaatgtctgggaaggttggatttactcccagcagggaggtcacagagatgtccagggagtggggtcctagaaatggacaaatctagagctaaagcccaggtctacgattttcagttgtttttttctgcagtgctatgtgaccctaatttcctaggagtaactaaaatgcaaacctcagacatttgtagacattttatgatttttctctacagcttgtaccactgttattattatttgctttatgctttttcctaaataaatttactttacaaaacatccttgtcctagtagggtgcaggggctcacgtctgtgatctcagctgcttgagaggttgaggtgggtggattgcttgaggacgggaatttgagacaaaacatctttgtcctatgcaatattatccataaaattacaggtttgagatatgcttaaattttcttctaacatgtattaaaataaacatataacttttaatcatcatattaaattgtatttaatataaatttatatacaatacatttttatataataaattatatatataaatgtatatataatagtttttcttttttgagatggagtctggctctgtctcccaggctggagtgcagtggcacgatctcagctcactgcagcctccgccttctgggttcaaacgattctcctacctcagcctcccgagtagctgggattacaggcgcctgccgccacgcccagctaatttttgtacttttttagtagagatggggtttcgccatgttggccaggctggtctcaaacacctgacttcaggtgatatgccgcctcggcctcccaaagtgctgggattacaggcatgagccaccatgcctggcctatatattttatataattatataaagttttctataataaattttatataataatatataaaatggatatttatttaagataaagttattagttttatatatttacatatatttaggaataaatgtgttactgtgggagcccagtgcccaggcaggtagtcagtacatgatggttgtcattagggttaatactttggaattctggattttttcccaagagagtgtctacgctggaatattgggcttgtggctttctgctgatgtgcatgtgtgaagaagctacttccacttattaggacttgtgtatctgtctcgcagtttcactacctattttctcgtgatgttggtcaagtcgcctaacttttctgtgcctcatttacctaatttgtagaatatgggtaacagtacacaagtgtgagtgtgtatttcccaggactgaccactagagggcgtgaaggcaccggcacttactattacagcaatgggtgtagtagtgctcatggtcgtaaacatcattctcccatgaaaggaaccagggcttcctgggagaaataactgattccagggctggggccggaaagcacaagcggagcctggagcatctcgtgaggccagaaagtaaggagccggctgaaaaataatggagatctgtcgaaaggtcacagatgccaaccagaaggagctttgaatgaccaattttgagacaaaatgagcactataagaaataatgatagtaataaattccaacccataaatacccatgagttcctactaatataaataaataattgaatacataaatatataaggatgaagaaacagctttttcttacagcagaattccaattaatgaatgtagaaggaatgatcaaatagaaaatcactatttggctaacagcacagtcaattgtttgtaggcaagaattatcaatggactttaaatatgaatgggtaaaagtatgatgatgctacaactagtgagtaccaagggggaaaaaaaagtacgttgagaagaaacaggctacttccatattcccaaagtatcacttcaggagctacttattgattataatgggacaaatagtaacttacagtagagaaacctggcaacagagtctctccgaggtacaaaggctctcttcaggaaggaggtaaggggaaggaagaagaaaacactgtcctgcctcaattatttgctttccccattctcaagtgtacttcatagacattcaaagatatgtgttgatagtgtccacgatccacatggctctattatagtcatttattcacacatacattcagtgaggctttgagtgcctaatgtgtgcctgatatttgctagatggtggatgctgagaagatcaggtgtgctgctgtctctagggtgactgaatccacctgccccactttacagatgtggaaattaaagtgaaaaggatttataggattagttcactgtcacaaggtcactagccttaaagttacaggagtaaagcaagtttcctgacttgctagattttctgctgcaggtgctgacaatggtgagctccaataggagagaggacactcagagtgaagtgggagccctgaacaccctggattagccaagaggacatgccgggtccagctgtgaccgcacaaaggaccattggggatatttgtattctctttttcacttagagcttgaaatgaggaaaactaagtgcagaaaaccaagagtggaagatttttcacaaagcactggtaacatgcatcagaaaaccctgtgctgatgtctgtcacggtgtttctcactgaacggtaatagtctggctttgagtgtgttccctctacagcctggagttctgcgaggcagggaccaggtgtgattcatctttgtctctccagtgacagtacacagcaggctctgataaatatttcttacaaaataaaatggaataaaaagtagacatctgcacaggtgtgggatgactgagcagcagcagaagcaggaaaagtcagcgtccccagatcagctgatgtggtgttcggattctagataggggtgaggtgccaggatggggatgggggtcctgtggctctgctgccctgggggacacccctaggtttcacagtgcctgctgtggttgctgcactttgcttccccatgggaaagtgatcagagggtgtggggcttcaggtgaccccatgtgggaaatggccaagggaaggtggggtgggcggcacatggttttttttaaccaatatttgaaggtaggttgtatgaaaaggtgttaggcttatttcagcttatggggagtaggacagggattggtgagtgtgtatcaggtatattttggctcaggatggaaaagaactgtcacagtaacataaggtcttttgggaaattacatgtttactggcagagttcaggccagggctgggtgtctgaaaatacctgtcagggtcacttttatggttacaagggcagagcttggcttggaaccaggtttcttactaataccacatattaagtattataaaaactgtcctttgcaataggacattgctctatgatgcaggttgaggtccctctgtttaagtaattgtgggtggctgtgattctctcatctagtctgcgacttggacttcacctccatctgcagtccctctcctttgctgttgacactggtcagagttaagcgcatttactgacgatggtcacagggtggcagcactgcctctctggtattttctaaaacctcttcctggaactgagccagtctaagaggatgtcatgactaagaaaagggcactaatgaggtgaacagataattttttttttcttgtttctcctgtgaagtaacagagtggaggtgagcatggaataattgccttttagaaatggaagacaatggagagaagtgtttcgcaaaccttaatgtgttcacagatcccacacagatctttttattcaatacagattctgatttttctggtgaggcctgagattgtgcatgtctaaggagcttttggatgatgccattgctgctggttggcggaccacactttgagtagcaaggctcgaagatcatttagaggttaattctcactgcatctaatttatggatgaaaacaaaccaaggtccagagagagcatatacagcttgcctaacaaagccattccctaagtgcctgacttcttgcatttaaacccagggcttcagcctttgtccagttctcactccacacatcacacggtttgttcactgttgtgaacgacagttgtggcagcatctctttagtttaggaatccagagccccaatttcactaccctctttggtcttggctcatgctgtgacttcgaatagttttgcccttacttaaaatcttcagtggctcttttgtaatcacaagatcaagttcgaatatctctgtctagtgttcatggctttataacatatggtatctctttagtaaccttacctaacttccctgttttaaaattgtctcttgctgccatagccctccttgctccttcctgctccctaacaaactgtgttcacttctctctcagtggtagtgatgatggcatggcctctgatgttagactcatgtaacttctaatcccagatccaccaccaacattggcaagttgattcatctttctgaggataagcatcctcctctgaaataaacttagatggcggttgagaggggtaaataaaataacacacaaacccactctcatccctgagaccctcttcaaaactagcatataaaaatagctatttgaagaggttcagtgaaattcaaggtaacacagagaaggaattcagaatcctatcagataaatttaatagactgaaataatttttaaaaatcaggcagaaattctgtagctgaaaaattcaattgacaaaccgaagaatgcactaaatctttcaacagcagaattgatcaagcagaagaaagaatttgtgagcttgaagagataatatatgaaaactcagagtcagagagacaaaagaaaaaagaattaaaagaataatgcatgcctacaaggtttgattattaagctactcaaagagatacaagagaagggtgaaaaccaacataaagaaatgtaaaaaacaatcagaatataaatgaaaaattttctaaaatgctagctagtttttttttgagacaggctcttactctcatcacccatgctggagtgaagtggcacagtcatggctcactgcaggctcaacttcctgggctcagatgattctcccacattagccttccaagtagctaggactaaaggcgtgtgccaccaggccaggctaattttttgtatttttagtagagatggggttttgccatcttacccagggctggtcttgaactcctgggctcaagtgatccaggagattcactgccaaaaaggatataaccaagtcatatagtcataggttatctaaagtcaatgtgaaggcaagaattctaagagcagtgagacaaaagcatcaattaacttataaaggaaaacctatcagtctaacaccagatttctcatcagaaaccttacaaaccagaaggtattggggtcctaatcttttggcttcttaaacagaatagctctcagccaagaatcttgtgtagagtgaaattatatttcaaaatgaaagagagaaatacagtctttttcaggcaagcaaatgcttcaggatttgtcacggctagaccatcctacatggaatgttaaagggacttctaaatcacaaaacaaaagatttaaatagaacagaatagaacctcttgaaaccaaaaaattcaaatggcctataaaacaataacacaataagaaaacaaagtagataacgatcaacatgatgactggaacaaatattaacattgaatgtaaatgacctaacactccacttaaaagacacagattggcaagataaataaaaaatcacaaaccaaatatcagctgtcttcaagagactcacttaacatgtaaggattcttatagactcaaggtaaagagatgataaaagatattccatgcaaatggaaaccataagtgagaaggaatagctatccttatatcatataaaacagactttaagcaacaacagtaagaaaaagacaaataaggcaactatataatgataaaaggatcaatcaaacaagaagatattacaatcctaaatatatatgcacctaactttggagctcccacattcataaaacggttatgatgagacctaagaaaaaagatcaacacaaaacagtgagggtgtcctgggttttctttttattggacagcagtgtactagcctatcactttcccagtcaggggatttttggtctccccattcccctaccatgggttcatgccaaagtccatattttttattagtgtttggaattggattttttttttttgaggtggagtctcgctctgttgcctaggctggagtgtagtggcacgatctcggctcactaacctctgcctcctgggttcaagcaattcttctgcctcagcctcctgagtacctgggactacaggtgcatgccaccacacccagctaatttttgtatttttagtagaaacgagatttcaccatattgtccaggcttgtatagaactcctgacctcatgtgacagggaaacaggcactcagtgaacttcatgcgattgaggagttaatgataatgagagaagggctgtgaggggacagcactggggacaccagagcctgtgacgggctgagttgctgtgccttgggagatgcccttttgactgagccctgggaaggagggggtgtgggggcaggagctgcctgcagagggagtggcctcaggtgggcggccacctggctgcagggaagaggtgacagagttcgtgtgcagagcttggagggtgaggaggaggtgggttgaggtgaccttggtgagggtgaaccatggggggctgtgggccctgctgagggaggccagccagccctggacctacagggtggtttggtcttttttgtcccattcccagcatccactgagtggtgaaactctgcaggccagggaccatcccactggccagaaggagcgcacagtaggtgcccactcagtgcatgttgggctggacagaacctcactctgccccctgcccccagctttgggagctgcagcaaggtccctccccctagggatctccatgcctctgtctctgaggggtgagatggggagacttcaaagggccatctcagagtgtgggggatagagacgcagaagtgtgggggatagagggaggcctgggctctagacccaaaggaccttacacacctcctgagtcttttcaaatggtttcttctgttactttaaaaatgatgtaagtcatcatatttattgtaaatcccaggaatctaatcatgcgtaaaataaggtgtcttatccttgaccccaccccttccccaattaaatttccaggatgttaccactgtttgcagttggtgtgaatctctctttaataatactctgtttatctcacttgtcgttttacgccaaaatacccattgaattatattattgctgaagaccattcttttttttttttttttttttgagatggattcttgctctgttgcccaggctggagtgcaatggtgtgatctcggctcactgcaacctctgcctcctgggttcaagtgattctcctgcctcagcctcctgagtttctgggattacaggtgcacaccaccacacctggctaatttttgtatttttagtaaagacagggtttcaccatgttggtcaggctggtctcgaactcctgacctcatgatccaccctccttggcctcccaaaatgctgggattacaggcatgagccaccacacctgcccagaccattctgttctactgaatcatgtgtggtgggcacctcttatatcaatacatatggattttatcttgtgtttgttattggctcccctttttctcattgcatggctacactcaatgctttgtccacacccctgttcctgggttggaatcttgtgacagaaaatgaagtaacaaaggctaaagctttctaaagtggagtcaggagattgcaagacaattgcactttcaccagcaagagctcaaaccacagaatgttccaatagatttggataaacagctgaagtcagtattcaccagccttcaacatctcaactaggagaaccctaaaattaactaagcacatagaatggaatggacttgtgatttaggattccttctcagccaatgagctgcttctgaaaacaactttttgtggaaattacctgtaaagaaaaccctctcctgtgcttgtcttacagaacactagtcagggctgccctgattcagtggacccgaattgctattatttgtttcctaaacatatggtattttctgtgaccttcatctcaatcttttttttaagttactgggctgtttcccagttttcataatgacgagacattctgcagtgtttcatacacatgtcttttccccatgtggagtattgatccaggagctcattcagtcaacgcatgtttatgaagcatcctgtgccaggctgtgggctggtcactgtcttcagcagagagaggacaggcacagtcttgccttcacagagctcacagctcagggaggctcttagaagtgggatactggtcggagcatgtgcacattaaacatgatgaggtcaaggttgctatagggactaaaccacagtcccaccaagatcgcattgagttcctgtggtagaccagaggtcagggcccctaagatgtcctgagcagctccctctgctcagaagttttggttccacaggtgacacacctgagcacaggtgacccctgcagaacctgtgattaccacccaaagccaagagtgagtggtgggtgttctaggaggaaccgtcacctccatgggcagggttggggaagactgaggggagcaggtggctgatgactttggccagaaggtagggggatgggcaggtgtgcgctcatagggaagggaagagaagggagggcattgcaggcaacaacacaaaggttggaacctgccttcatggactgagaaaagcagggagtccacccaggctgcagctggggagggaagacatggggagcagtgggtctaggggagaagcagactgcgattgaccttggggactgggcagtgagcagaggtgtgttatgtgtgtctgtccccatcatagatatgaggaggggtgaggccgcgggtggcacctgggtcggtgggatttcatagtgcctgctgttccctagagcctctctgtatagagggtcagaatagatctgaggctgtggtctgggggaaggggctggtggtgcttaccatctctaggggtgggaggagagggatgaggatgcccctgagcagtgaagcctcaaggtgtgtggagccacagttgtctctcattagacatgtgttttgcgtgaggatgccagggcctggtggttattactgttgtcaagtttgcatgacaaggacccaggtatccagggatccagagcacagggcccctggtgaggggatgaggctcagatggggctgaccaggttcatgtggtcagagtgggagggactgatggagagacagagcctcaacccctcctgtcaggagctgtggctatgtccaggagagatgacaaggatgacccaggacattgagtgagtcattgagacattgaaggtgaggacagggcagagaggaccctggtgactgctgaaatgtaggatgtgaggagggctctgacccatgcaagttacaggacctccccacccccgagcccacagatgacccttaaattgggcatcctgagtgctgtgtgtgcccagcagggacactggataggctggacctgagtctctgtaagggcagcgctggtctgtaggaccagagtcttctctgtgggtgtgacgtgggcaggaattagcaagatgggggtgacaaggcttggcttggaggatctggtacagaagcccatgggcttggtcagctcagcttctcaggggctcagctggggctggaggagcaggatgctgtgctcagggcatgctccaggcagcgtgatgtgtgtggttccagggtcaggcacgggggtcaaaaattaaccatgaaaagttcccaccttctgtaggcagagaaaatggcctgattgtcagggtcagggagacttaccatgtggccaaagcaggctctcagcctcccagagaccacaccctgggtgcagcactcagctctgcagggtatggcaatagatgtgccaagaaccccaacatccagatgcatgcaaaaattttgcgatatataaaatagagcagatcaagtttccctgcaataacgttgttcctggttgtgtctttttcttgtaaactagacatggacatctttccagcagtctgttctcatctgccaccttcctgctgcagcacctcagaatgaacattcctgagacactgtccgtggtgctgacgaccaagagctatggaacagagtgtgatgtagaatcttctagttacctctgctctcctttcacttttaacaacagagcatcattaacaatgagaaggtggagaggtgttcaggatcttgaagtgacttctgtcttgctctcccataaccctgaagctgctgtagacattattgcagaaactgacaccacagtcaggatggccttgtccaggagcccatgtgcagtttgtagtgagcaaggatgagaaaatggtcttgaaaggggtgatggacagaacaggggcttttcaaaaatgtcacatcatcacccccagcatccgtgaatctgtcacatggtaagagaccttacagattaaatgaaggattatgagtttggaagattattgtagtttatccagatgggtccaacataatcacagaatcccttccttacaaatgagagagggaggtgggagagtcagagaaggaggaggagatgtggggatagatgcagaagacagagcggtgtcaagatgctgcactgctggctttgaagatggagaaagaggacacagccaaggatgcaggaggcctctaggaggtggaaaaggagaggaaacgcactctgccctggagcctccagaaagaacgcagccatgtgggcaccttggttcaagtttctgtgtcacttagcttgtgggaatttgtcacagcctcaacaggaacctacagaggagtcaccttgtgtgcaggtgggatccagggtcatttacagctaaatcctgatgtaaatattgcaggttgcttttcctacttcctatctcatggccaacaaccctggacaatggcagaacacccttggaaaccacggctctgtgctttagtggagggaccagcttgtttgtgggaaggtagcacctggtccaagtgaacctacatgagatcgttactctccccagggccctcagggaagggctgagaacagctggcccaggtgtgtggaggagctgcaggtgaggcagggctggaggggcctgtgggtccaggtagaggggcagacaggttgtcccatcgccatgggagcctgcacgagctttaggttggggaaccctgctcctctgacctggacgctcctgtgtggagaggaggcttgctcagtgagatccacgccagggggtaaattgggaactgatgggaaatgaggggctagagtcctgggtagtgcctgggaggaccttgctcaaggactgaattcttggtctgttcccaccttggttactctgacaacccctctctgtgtcccacggggataaagatctcctgagcagtggccattgggacagaggagaacctggtggccagagctaagcatccaggatcctggatttggggacaggcaagctcattgctgggggacagtgatagatacggcctccagggcctgggtgaagagagcaggagggctcaggacactggaggctgtgtggaggtcacacccacgatctgtaccacccatggatgctcctgcattgctcacctttgtgtggacatcagatggccccaacttttgcactcctgagacatctcatgcattcacagagggacccaggctggggctgtgcatggccttggtctctagggtagtgtgaggacagctgagcactcagctggctgggcaggactcctgcgaatcctgccctttcctgtgtagggtccaccccagcctgactcctaaccccctactcctgtctttccagggaagagagactggggttgagataaggtggagatatttttcctgtgtgacccaggagagaatggacatggagtttcaggtgagtttctgctaagttcccatgagcagaaaaagagccaatgagaggaagtttcccctttattcagatcctttccaggtgaccccgggtgggccataggcccattcactttccctgcaagcccccgcttcctgtggtgatgggaagccttcgccttggcccacccagagcccggggcagtctgttgaggtctctatatattcagcagggacccccatcccttcctgtccccaggcctgtgtctcctcaggactcagagctggttctctggctcaggctccatgtccttccccatccccagggctgggggcttcagggacgctccatcaacccacaggagcagctcccagaggaacctaagaagccacatctgctttgtggtcgatccagcagtaaatgtttgtgtcagagtgtagcaattccagtaaaaacagagaagaggtcttgacccctgaggccttctcagaacagggtctggcatctctctctgggcccacccagggctactctgggactgaacctggctgtgctcagggggttcctgctcccaggcccctccctcctctgctcaccacctcctgttattttcactgcagtttcctgaacttcagctcagccagatgccagtggggacagatcctgggtctccctggggcccaagggaccagaatatctgtggcccccactcacctcatagatgagagcagctgccctggtgctgggtaggggaatctgggcaggggagagaggggtgtcaggggacagggaaggattcctgctgtgtaggaattccagggctctcctcaggtgatggagggtcccagggtggggttagcacagggagtggatgatcctggccctgaacagaggcccagctcatggccagggcaggtctaaccttatccaagtcattctgggtagggtgggtttgtgctggggattgacagtccccctgccctgagcctgcacagctggggccccagtggaaatgggattgggaacggacagtcttacctaggagatggagctgtcagagggtccatggcctggggacagagacaaaagtgagcacgagagtgttaggatagctgggcccctcctgcaagagtgtgtgggggtcctcagttcttagagaattggggagagggagcctttctcaggttattttaggggtcaagtaagcaagtgaggttgaggaagtgacccatgacccagagcccggaggttagggctgacccggccagttggggtttcctgtgtgatgttttatgggatcctctttgcagccccagggatagggtcagaggcccctgggtgtaactggcaggagtggacaacttggggctggcttagtagttcccagccacacccagactgaagggacactcaccgggggtggaggctgggggctgctgctccctgaagtcactctgatcgctggccctaggaaaggtcagggttatttgtgaaggtgcaaggttaaaagtcacaaattggagttaaaataggggaccaggaaaggagcctatttccaagaggggtatggagacctcctttctttatggagttctgtggtaggaggggcccaggtgaggggagttgaggaaaggccttacaaagccacatctgtcctggccagaggggaaggactctcaggcagatgctgggccaggagaacattgatccagtgacacaggaaagggactgaggacccagggaaggaatcagaccaccaggggttgcctgagaggaagggtcaaggcaccagggggaaagcagggccaggcacatgtgcaggacactgaggggactgcatgcatcttggattctcctggaactcagtgtccctgctgtgaccagacactccactcagggctggagatgctgaaatgggacaatgatcttgtcttctgtctctgccctttggcaagagacataaacgacattccaggatatgccatattggggccccggttctcccttctcacagctcagtgtctgcagttaccatgtcagtcaaaggggtgctgaccccacccagcccgtccaggctgttccagtctccactatgtgataatgcccaggatcccccctcagatgccctctcactgggtggatggattcagtgaacagggggaggtaccaggtattgagcaccgctcccccctgctccaggcagctgtggctttgctgtgctaggaaactaggaccatgctcaggggcatggccttaattggactgaattcactgaggacaaagctgttgaggaagcagcccagggtcagcagctggtgaggaaggtgccatggaatgagagggaaggatccctggggagtcgggaggctggggagagcctggcactgaatacaagacagggtctccttccttctcgcctggggtcagcgtgaaggatgggagcagaatggggaaaagctgtggtacctgccagtttttcggaggagcaggaaacacacaagtgcagccaccagaagactcccaaccaggaccccgatcaggatgcctagagtgttgtcatctgctgaaagaagaaggcaaaggggatgaggtccaaatctgttccagggggaaccatgaggggccttgcagggcaggggcatggtcagggaggaaggaaatgccatggagcctgagtgtggtctgttgtgctgtcctcatagctggctcccttgctctccgtggttgcaccattttctgtgtcttaggcttgaattactgggatgcatcaactcctacattctcccacaggaagcctgcacctcatcctgctcctgtgttttttagtccctccttcctctcacatcactcctcttccccctgtttctttttttccatcccatggcagtcgtaaagggcaggcccttgctgccaactcaatgctgatgagcagggatgatgttcattgactgttttcaggggccttccacatggaaggcacagtgggaatcaatctacctgcagcttttctcaccctcccattgccttgagggagaagggtatgtgatattgtgaaatacgtatttggtgttcatcaccattgatatggttaggctctgtatccccacccaaatctcaccttgaattgtaataatccccatgtgttatgggagggaccttgtgggaggtaattgaatcatgagggtgggttttttccatcctgttcttgtgatagtgaataagtctcaggagatcagatggtttcataaagggaagcttccctacacatgtcctcttgcctgctgccatgtaagacatgcctttcaccttccatcatgattgtgagacctctccagccatgtggaattgtgaatcaattaaacctctttcttcatacattaccaagtctcaggtatgtcttcattagcagtgtgagaatggactaatacagtaaattggtaccagctagtggagtgctgctataaagatacctgaaaatgtggaagtgactttggaactgggtaacaggcagaggttggaacagtttggagggctcagaagaagacacaggaaaaaagtttgaaacttcctagagacttgttgaatggttttgattaaaacgctgatagtgatatggacaataaagtccaagctgaggtggtctcagacagagatgaggaacttcttgggaactggaacaaaggtgactcttgttatactctagaaaagagattggtggtattttgcccctgccctagagatctgcagaactttgaacttgagggaaatgatttagggcaactggtggaaaaaaaattctaagcagcaaagtgttcaagatgtgacttgggtactgttaaaaacactcagttttatgtatttacaaaggtatggtttggaattggaacttatgtttaaaagggaagcagagcataaaagtttggaaaatttgcagcctgatgatgcaatagaaaagaaaaatccattttctgaggagaaattcaagccagctgcagaaatgtgcataaacaatgaagagcaaaatgttaatccccaagacaatggcaaaaatgtctccagggcatgtcagagaccttcctggaagccccttccatcacaggactggaggcctaggaggaaaaaatgtttcctgggccaggcccagggctcccctgctgtgtgcggcctagagacttggtgccctgcatcccagccactccagccatggctaaagagggccaaggtacagctggggccatggcttcagagggtgcaagccccaaaccttggcagcttccatgtggtgttgagcctgcaggtgcacagaagtcaaggattgaggtttgggaaccttcgcctagatttcagaggatgtatgaaaatgcttggatgtccaggtgaaagtttgctgcagaagcagagccctcatggagaacctctgctagggaagtgttgaagggaaatgtggggttggaaccccgacacagagtccctactggggcactgcctaatggagctgtgagaagaagaccacaatcctccagaccccagaatggtagatccactaacagcttgcaccatgcacctagaaaagctgcagacactcaacgccagcctatgaaagcagccaggagtggggctgtaccctgcaaagccacaggggtggagcccaaggctatgggagttcagctcttgcatcagtgtgacctggatgtgagacatggatacaaaggagatcatttcagagcattaagatttggctgccctgctggattttgggcttgcatggggcctgtagcccctttgttttggccagtttctcccatttggaatgggtgtatttacccagtgcctgtacacccattatatctaggaagtaactaagcttgcttttgattttacaggcttataggtggaagggacttgccttgtctcagatgaaactttggacttggacttttgggttaatgctggaatgagttaagactttggggaactgttggaaggcatgattagttttgaaatgtgaggacatgagatttgggaggggtcgggtggaatgacatggtttggctcttcttcacccaaatatcaccttgaattttaataatccccacgtgttgggggaaggacccagtgggaggtaactgaatcatgggggtggattcttcccatgctgttctcatgatagtgaataagtctcacaagatctgatggttttagaaaggggagttcctctacacatgccctcttgcctgccgccatgtaagacatgccttttgccttctgccatgatttcaaggcctccccagctatgtggaactgtaagtcaattaaacctcatttttaaaaaaattacccagtctcaggtatgtctttatcagcagccaagaccagctcggtcgcggagatcctaacccagcagtgctagaggaattaaagacacacatagaaatatagaggtgtgaagtgggaaatcagggttctcacaggcttcagagctgagagccccaaacagagatttacccacatatttaataacagcaaaccagtcattagcattgtttctatagatattaaattaactaaaagtatcccttatgggaaaccaagggatgggccgaattaaaggaataggttgggctagttaactgcaacaggaacacgcccttaagatgcagattgctcatgctattgtttgtggcttaagaacgcctttaagcggttttccaccctgggtgggacaggtattccttgccctcattcctgtaaacccataaccttccagcttgggcattagggccattatgaacatgttacagtgctgcagagattttgtttatgaccagttttggggccagtttatggccagattttggggggcttgctcccaacagactaatacacccattttctggtatgtgactctaaagtccttagaatcttcaaagtgatgtctttttcaagctaataattgactgatgactggcagcccctaggcaacttcagaatgaggctggtcactgacccaggtaggattagagggttgggactttcagcctcacccctaatccctggggagggacctggagtttgaattaatcaccaatgaccaatgaatcaattaatggccaatgattgaatcaattaatggccaatgattaaatcaatcatatctatgtcatgaaccccaaaaggactgggtttgaagagctgaacccatggaagtttctggagtgtggtgcatctggggagggcatggaagctccacaccccttcccacatgccatgctctgtgcatctcttcatctgcatcctttgtaaagtcctttattacaaaccggtaagcctaagtatgtgtttccctgagtcctgagagctgtttgagcaaactaatccaacccaaacagggagtcatggaaacctcaatgtgaagccagtcataagaagctctggaggcccagacttgtgactggtgggaaggtggtggcaattttgtgggactgagccctctgctgatatgtccaggtagatagtgtcaggatggaattggaggacacctagctgatgtacggtgcagaactgattggctgctgggtgtgtgggagaaacccccccgcatcacatttggtcacagaagtgtgtctgtgttgatgattgttattgtggagtgagagcagaggaaaaacacagtttgagtttttccaaacagggtggaatcccatctgccaatttagaatctgaaacttatagtttcagtacttcaattaagattgaagtacttcaattcagtacttcaattaagattcagtacttcaattaagattcagtacttcaattaagattacagaactggtaagtgaaagtgatacaacaaaaatgtaaccaaagtctgctcaacttaacagctaataacaacaaagttcataaaaataataccagtcgatattgatagcactgattgagccctggctctgtgcatgaccttgttaagggctttaatcgcattaatctctgaataaatatcctcacaaccaccctgagatccaggtgtttgtaacaattctacagatgaggaaactgaggcccaggaggttgagtgtcttgcccaaggtcaaatacctggtacctattgtaaccaggatgataactggatgagtctaatccctgagttcttacccacattgctccccaggctctgaaggaatctcatccttctcattccgtgtatcattttacaccccccctccctcctaggaaaatatacaaggaaaggagtgagaggggccgagggtcactcacattttacagtcagcttgagggggtcgctcctgttggagctgactgggttggagacctcacactgatactccccagcgtcctcctgcctgatggggtctatggtgagcatatggttaaaccaggacagcttcatcctcttcgtgacctgcagacgctggttgttgaaaatccactggaaagaggttccagtgttatttgtgtggcaggtcaggaccacggagcccttctctgtgactgtggtgctgctggcttggatggagggctgagccactgactctgtggatagagtgaccaacagaaagtgtcttggggccatgctgcatcctcagagatctcagagtcaaatttagaacattctcctgtgaataaaggagaaagatgaaggacagggaggagcagagagaaccagagacacccatagcagcgagcagtagggactacagtgacctcagagaccccagggaccaggaggacccagctgcctcagaccaggaccagggagccctgaaaaccctcccacagatgagcggccccagagtcacatgagatgcaatacctggggtggctttaggagcaggcagtcagagaaatggaacatgggtctcagcccctaagggacaaggaagaggtgtggccagctcctcctaggatcctacatccaggacccagtctgtaaagaggttatgattattcctttcttttttcattaattccctccctccttcatcagagaactactgagtgtgtgtctcagttgggccttgtgcaggtacagggtgtagtgggaagagaaagctgagtcctttccttcatcctcccatgggagtgacatcaacaaatcaagaaattcatgatttcacgtccagtgagggaagaaatgtggatctgatgggagaggcttggacaatcctggcattgagtctgatagttgagacaggtgatttcgttctaagtaaaaactgactaattctccatttgcccgtcattcctcagaccagaatctccctctctgagctgaggatgcccaagaagaaaggagctgaaccaacatctggtcctggggtccacagatgccccacggtggtggccacgaccagattctgggctgcagacacacggtggtgtgacgttgagcactgacagcctgtgtgatgctgatgcaatttctctttaataaaatggggtaaatgtcaatggtccctggcttgccatcctctctgtaaattaacattaaaatatttacaattacctgacctaaagcttggcacagaatagctccaaataaacatcatctattattattttactccaaaaaaaaaaaaaaaagagttctctgggcctgattcctggtggagaaggagcggtccagagtgtcttttctctgctttccctcctcctgaggacagtgcacttcccgggacatcttttaagtttcccatccagtttaatggcctgggaagtttgtttgtctgtcctctccactctgactctcaggtgaaagatgaggctctgcccttgcccagatggggctctgggggctgagccctgcctggtgaccagctctaggaaccacggccctgggacagctggtaaatcgttgctcacaatcagccctgcccaggaagccacaacccagccctggcacaggctccccagggtcatctggagtcaggatcttgggacaggggcctggggcaggggcttgaagggctgagcttctctcagaggatcctcaggccaggccctgactgagtcctataagatctttctcaggtcatgtctatgaggaggaggccaagcggggttggactgagactgattttcccccgctgcatctcccgcatcagactatccttcttgctgtagggaatttccacggagtccggataagggaaaggaattctgatctgttatagtttgtctcccctgggtgtgtcctgcactaaatgcccaaaccccaacatgggacgtaatgcagagggggatgcaggcacagcccaggcctgacaatcctgcgtatgtgaagcagaactgacccccaacacccagaggcacggaggaatcactcaccgtatacacggagatggtgagatgcctgttcaatctgagaatttctgtatgtgacttgtagggtgtagtatcccgtgtcctctagggtgacgttctggaaatgcagatctccactgggtgatattgtctctcgaccgctgtatgcaggccctggagtcctaacgtgagtgtctattacatatgctgcgattagctggttgggctccaccgttttccctttgtaccagccatagctgtaaagattctcgggcagataaaccacagagagatgaacattctccccttcagcaacttcaaagggcgctgatgcaataaagagccaggcagtggtgggtgcgttccagaaagttaaaagtgaggctaggaaagggagagaatatcagtcaatatttgacctatgcattggcatggaaagacggggtcctgggtgcaggtctcttcacccctcagccttagagggtgtgtgtgtgtgtgtgtgtcctactgggtcaaagtcagcagcatgaccctcattccttcagtacctctgaccttggcatttccttgtgtgaaccctctttcccaggggtctgcatggttccctccccactgccttcagttcctactcacacaagggaatccctgggagacttctttcgtgaagcctcctctagagaccctgggtcttccctttctgacctttcccagctctgttccctccagggctcttgtcagcacctgacctcacattctagatctctttgggtgtctgtcttcccccccatgagattgtgagctctgtgagggcatggacttgagtgatgttagttgcaccccagtgcctgggacaggctgcagactcctgtggatgagttcatgagcgttcccagggccttccatatcctggggtttatttgctaatgtctgaggttggcagatgaagacagagtttcatgccctggtggtgtttttatttaaattgtcactgtgatatagttttactatcattttcaaaatgtagtggccactgacaatgaacttgaaaacatggaccaactgagattgttttgccccttggcaattccagttcacttagattttttggttctccttagacgctctctcccctgagtctctaacaaaagccctctgtctcctctcagagccccatcctccccaggagaccccagccagtctctgtgctccctcctcccacccactcccagggagtcctcccctcacctgtgagcaagagcccctgccaggggatgcattctctgtggggacaagctgaggggggccccatggtctctgctgcctgctctgtcctcctctgtggagaggagcttgggctccaggaacgctctagacagggttactgtgactgttgtctctgctgtccttccttcctctatgctgagcttcctctcaggcaggagcacttcccgtttatgggcaagggcggggctctgcctacaatgtctctctgtcccctcccctctcagtcctgcctcccttgtccctcctttctccttcctttttgcctatatttggttccctaggcaaaactttgagaagcaacgctgatggggtcctcataacaggacgacccactctccccagtactgacctctgctgtgttctggccttggttctgtcacagccggtagattatttccctttgtgacacacaaaaccagctgggccctgggtctcctcatgctctccagtgctccaggaaggcagaatgatgcccagcaggaaagtgacagaggtggctctgggggctagaaaggggctcactgggtgatggctgggaaggacccacccgctatcttcagtgtcaccagcctggcctctgacccagggacagagacccaggcctggaggtctcgggaggatccccagctcctaggtgtggagggaggtgtcctgtgtgtcctgggaagagaggactttgatggaaggaggtgggaggctctgggttctgctgtccttggtgaaggtttcagggggaccctctccatgtctggggtctgtgcccccagcttaactctcattctctttgcaaatacatatattttgtggatctgcagttgcctgaactgtctcatgtccctaaatctttgtatccctttttacagaaggtcaggaagggtgtgtacatgagtatgaggactatctgatcagggcgagtgtttgtttcccaaagatctctttagatatggtataatacataagataaatgtactgaattagcaattttaagtgtagaattaaatgatactaattctattcacaatgttgtacaaccatcaccataattttttaccagaaaatcttcattataccaaatggaaacttcatacttttaatcaataactccccacttccccctgccccacccactggtagcctctgatactatcaatctctgtgaatttgcctagtttacatgtctcatataataaggaattatatacgtgtattatttttttctggattatttctcttagggtaacacttttaagattcatccacgtcgtagcatatattacagcttctttcctatttatggctgagtaatatcccaatatatgtttatacctcaattttaattcattcatctcttaatggacatgtgggtggtttccacatttttgctattgtgaaaaccgctgcaatgaacttacacttggaagtatctgtttgggtttctgtgttcatttctttgggggtacatataggagtataaatatggggtcatgtggtagttctatgtttaagtttttgagaaacagccaaactgttttccagtttgctgtgctattttatattcccatcagcaatatacgagggttccattttctctacattcttgtaaacacttactatttaatattttttaaaacttatagccattctagtaggtgtgaagtgatagctcattgcagttttgattttcatttccctggtggctgatgaagttgagcattttttcatgtatttactgacaattttaatattttttagagaactatttattcaaatcatttgctgtttaaaaaaaatgggttatctttttattattcagttgtaatagttctttatatattttagatacaagtcccttatggggtacatgatttgcaaaatttttctcatattctgtgtcttctcactttcttcatggtgttctttgaagcacaaacatttttaactttgatgaagttcacttatctatttttaattttgttacttatgctcttgatgtcatattgaagaaaccattgcccaatccaagatcattaagttttactcctatatgttcttctaatggtttgataagttttgctattccatttaggtttttgaaacattttgagttaacttttgtatgggctgtgaggtaggggtctaactacactatctcgcatgtggttatccagttgttccagcacaatatgaagaggctaccattctttccccattgaggaatcttggcacccatgtcaaaaaccaatgggctgtaatggtgagggtttatttctggactcttgattctattccattgatctctatgtgcattcttgtgccagaagcacactgttttaatgattgtagtgttttagtaagttttcaaattaggaagtgagtcctccaatttttttttccagattgttttggccattctggggtgacttttaaaaaagatgtagttcaatggttctcaaagcaggagtggttcagctctccttttttggcagtctggagacctttttaggaccttaatctaagtagataaattattcccactttcttttctgagttgctatgttacagtgtatattgacacccatgaaataattgagagaccctggaagtgcttgcctacatagtgagggacaattagttccatgatcatgggcacagaagattttgttttgggaaacaattttgttggtggagttatattcatgcttactcttttatttgtcttcatagcctgcatctccttcagacttcatatctgtttattttcttgtttgtcctctggggtttgggtgttgggtgaccagtcagctggagctggaggaggtgcttagcaaggcagtgaccctggttgggaggagcagggctcagcagggtgaaagtagctgggccttgagtcaggagtggcatctggaaggcctgactgtaagggtcagaagggccagcaggtgggtgtcctaggcacaaacggtggctgctgctgtggactggaggaaggtaagaggccccgagtattccatgttcttactggctccccaactgaggattcctctcctgggctggtgctgtcctgcagcagggaggggttagacagggacggctgcacatcaggccggagtccatgtcatcctcttaggcactgtcactacagattgaggattctgttcataagccaagcctttgcacaaggaagggacccgggctctcaaggaagagcagctcctggtcagacctccatctccttctctctcattgcctgaggcctcaagcttggtctacctggcacaggggtctggatcctcctcccagggttggggtcttactgagctgggcacctgcaggtgggagaagatctggaggggccccatctgccttcaccagattgatgttgagggtccctgagtcctgcaccactatcaggtgctgagcaacttccagtgtcagtgacaaccaccccatggtggaagcagaaccacctcgtgagaaagcacctccaagcctcagtgcttgccatgtgtgggaatttgctggtttcagttgggggcatgttggtgggtggtcatgaattcagggccggattctatgctcacagtgcacatgctggatgtggtacagaccccaggcagggctcagtggggtggttttgggtgtgcacaggtatcttttctggaggagctggtggtgatttggctcccagaagttcctgagctctgcagactcaccaagcactcaatatttgagtgaacattgggcgagagagcagaaggtaagtgtcagggcatcggggttggtgcctctgggaagaggaggaacattctgggaacaaagctctcccccggcttacagggagcttcccatcgctcctgccttgaggatcagggaaactagggcctctgctcttccaggggctgcttgcaggcagtttgctctgggagggggtgacccaggagttgcctctcattttgcatttgagatttaaaaggagaagggacagtatatcttgccaggtcacaaaaattacaggcatcatattgactgaagggcactcctgtcatcactgcaatataccagaatggtcttttaaaaaaataagtgatttaggtttaccagcaactgtaatgcttgttttattcttctagttcaccgttaatgtcacttttgtagttttagcactggcaatgttgattttatgttgactctgatgattttaagctttcatttgttcacatagagatcatcttctttctgaatattaatgcattttttctctatttctactggttattcctgtacatagagtagagaatcacttttcccaaggaggtggaaagcttctgactaccaaaaaaaaaaaaaagtgtcaaaatgctttaaagtcagtaacttaaagatcaaatccaagagtgggcaacagattctgcccagggtctgaaaggtggagaggtgactggtgaggatgtttaaaagacctctcctctctactccctaaatgggggccatccagtgttcttgaggttcagagaaggcccagggctggggcagcagggcactgtcagctcccagctcccaggggccaggagtaagaccccaacactgtccagacactgattgcattcattttgggggagagtagattcttatttaaagaataatacaaaagtctacaaatatgaacataaacagaaattcctttgctacaattttccccttaataagacattccttcctaatgacatatgtgactgcattcatggctgagatgttttctaggatggtgagagcatcagagtggactatctggtgccttggggtcatgcattttcttcttccaatgtctacaggatcccccatgtcccactttgtagtgtaactcagtgtgtgtcattctggtttttgttgtatagatccttggaaagcccatgtcattcctgctgtgaggtacaggcagccaaatggcatcatctctaaacatgccttctcctggtacatcaaattatggaataaatgaaagccattttgacagatattgaagatataagtttctactcttcccacacatgcttctcccaagtgaaggattttactggtgaattgttattagagattagtgtggatcagtgactctgccaggggaaattttgccctctaggggacatttggcaaagtctggaaacattgttggttgtcagagctgggggagggagtcctgctggcattgagtgggtggatggtgctgaacaccctgcagttcacagagccccaccagtttgaccacccaaatgtcaatgctgaggagtggagagccctgctgtgccctcccgcagcttccctgaagcttcccctcacctgctcctcccatgtctccccaccacttccccacttcacccgcctccttacacctcagtcccctccacctgaactcaccccttagtccaaggccagccctgatctccgctctcctggtctccttgctccttagcaggaggcgcccactagatggcgcccttgcccttactggagctcaccgtctccctttccaccctgagacaaatgtggctgcttttactgccacaaccccagccctccacactctagatttgctcagggagcagctcctggacagacctcagggaccccagggaggagcctcactctggagattttgatggcatggtctttgaacttcactgttacccccagtcaggatccaggatgttgggagtgcatgattctgcccggtcccacttcagcaggaccccactgctgagttgtctgtggggacccgggcctctcatctccttcttgcattgcaggagagggatcttagcactgctttcacataaagtcagataatggaggagtgcaggtgagtttgggaaggtggacatgaagagaggttgtgtccctagaggtggcagcagtgagaggatgggcaggtgggaggaacacagcccatccagggttgccagccatattaggagcgacagcctttcctctaagcctccagcctttttcctgaaacattccagaactttccacttcagcacttcccactgaggctcctcaggtctgtccctgagctcccagctgagcctacctacccatctgaaatcctgagtcctgtgtcaccctcgttccccattattctgtgcagttctgtgggacgcccagctctcctgacacccccagtcttcagaatggccatcagcgctgtcgctgtggcaccagggtgactgccgcctggaggctgagtcctggcttcctgacagctgtggggcccgctctaggctcccttgtcctgatcattcatcacctccaggatgcacagcagctgggccagggggaggagcagggacaggtgtcagccaccctgtgtgtctgcaagtcaggctgggggtgtgggaggacgccaggaatgactgaactttctgatttagagggtgagagcttgcactgatggaatttgggatttaataggaaaagcatagcgttttcctattttgtaggcagggtggctggagtttggaatcatagattcccctgggatgtcactgtggacctcagtcccacccgttaggggcacagatttcagaatccacaccctggggcaaagcaggcatgggaggctccatcagcctggccagggctctctatttgtgcagctgctgcaaggagatgtgcactctgatgggaacagtgctccctcctccttggggggcagtatctagctccctgcagcccctctccctgcaggccctgccctctctgaacctcaccttccccaacccgccccccgcaatcccatctcagctgtaatcccaacactttctcatccattatgggtggactgcttgagcccaggggttcaagactatgctggctggacaatatagcgagttgttgtctctacaaaaagacaaaaattagctgtgcatggtggcatacacctgtagtcccagtcactcaggaggctgaggtgggaggattgcttgagctggggaggctgagttggcagtgagttgagattgtgccactgtatacttcagtgtaggtaacagagcgagaccctgtctcaaaaaataaaagtaaaaaaaaaaaaagaaatatggaatacattattgttaactctaatcaaccatgctatgcaatagtccaccagtaataccagtaatagccaataatgaattatctgaaaaagaatacaatttattcttagctatctactgctaaaatttttaagctatcttttatgatagctgaaacaaaagaagtaaatttaaccaaggaagtaaaagacctttataatgaaaactgtaaaacattgatgaaataaattgaaaaagacacacgcacaaatagaagatattccatgttcatgaattggaagaactgatattgctaaaatgtccttaccacccaaagtggtctacagattcaatgcaatttctgtcaaaacaccaatgatattcttcgaagaagtagaagatcctaaaattagaaaccacaaaaattcctaaaacctgcacaaaacaccctgagttgccaaagcaatcttaaacaaatagaacaaagctagtggcattacacttcctgacaatcaaagcatactgcaaagctatagtaaccaaatcagcatggtcctggcataaaaacaagcacatagatcaatgaaacagaataaaaatcccagaaataaacccatgcatctctagctaactgattttcagccaaggagccacatgcacacaatggggaaaggacagcctcttcaataagtggtgctggggaattggatattcatatgcagaagaatgaacctagaccctatccctcaccatgcacaaaaaattaactcaaaatgtattaaataaagacttaaatgtaagaactgaaactatgaaactactagaagaaaatatagggggaaaatccatgacattggtctaggcaaagagtttttggataaaatctcaacagcataagcaacaaaaccaaatataaacaaacgggatttcatcaaactaaaaagcttttatacagcaaagaaaaaaaaggccagcagagcaaagagacaacctacaaatgggaggagaatatatttgtaaatatatacatatatatttgtaaatatatacatctgataagaagataatatccaaaatatataagaaaattatgtttctgtatagttttatctgactgggatacagaggccacatccacagtcccatcctcaaaggccacttgttcccaaaatgtcaagcacatccctcaatgatccatcatcaacacctatgtctgtaggatgaagggtgaatcatgaagcactaaaaaggaagaaggaagccaatcccaaaacaaaatgatgcagggtctggaaagtccaaagcattttttttttttttttactgcatcttcctcctttcttctccacattcccaatcctcactattgattaacaaaacaaaaaaaactgggacccaccatcttccctactgtcaggagatctagcgagattgtttgagtcttagaccaaactttgccataagccaaatttctggctgactttacaatgatatgagctagcacagtctctttttctgccagtcaacttgtgctcggttttatttgcaaccaaatagaggtggtaaccaaatataggtgaccctaaaattagtcatcaggatgaaatcctaaaatgtgcaacaaactgggttgaattcaggattagtagcaacatctctgttgtgggcttgaaaagggggcacccttttatgcagtagcaaaattgctaaattgttgtttgctgagtctttggactctcatcccggattttctatgaccattcaaacagggctgcaatgaacatctatggttgtttagcttggcacacttctacatttctatatagtaatatctagaagtgcatttgctcaatcacaagatatgcacattttataattgactgctatcgaactaccttaaatagccttaatttgttctcaacattgtttaacagggtctgtttaatgtcctacgtccagcaaggacagtatcacttttcttaatatttttcaaattattggaccttaacaaatacttaatgtgcaattaattgattcctttgtattcccatgccttcttttatatgtttccttatagtacacaaaaccacattattgtttctttacttgtgtcattccaccctggaccattcctatctaaactataacattatgagagagagagagagagaaaacaatatgaaaatataaattgattaatcaaaaaaatttaaataggacaaatcaggaagacacaagagagattttaaaattattcagagaataccacaatagctgtaccaatatattttaaaacttagatgaaacggacaactatctcgataaatgtaaattaccaaaactgactcatgaaaaaatggatattatgaatagagcaataatcagtaaagcaattaaaaagacagttgataatttttatttactgacaacaataacaaaatttcaggtcctgatatttttatggtgaattttaacaaattttcaagctcctcctcaaccaattctcagaaggtttaaaactttaacaagaaaacactttctaacacattttcagaagctgttatagcatgataccaaaaccacacaagaaaattatagaccaatctcacttacaaatatacatgcaaaatcaaacaaaatcttagtgaaccaaattcagaattaataatagcaaacaagcaaaatatgttatcatacgtatggcttatatcaggaatgcaagtatgtttcaacatcagaaaatacttctccacattaacagactaaaggagaaaaacgcttgtttaattatctcaataggtttttagagaattttgaaaattttataaagttatgcgtattctgtaaaattgatgaaatccaaccttgatttatttttaaaaattgcctttcctatagaattataggtaaaggaaacacatgcatcctcacagagctacttcaaggctaagttacttcccataagtaacgtatcctgtaatgtgtgcttggcacatattcaatactaaacaaatatttgcaaatcctcaaaccacttctcgctcaaataacccacctttgtcttttgcctttatgttagggttgattttctcaattgtatcttggagatcctttggtgggtctttcagcaattaccctgaatttgcttttctgtttacaattttaattcctgggaactctttcttgttctctgactgcacccttttcatgagagttcagccatcaatcctccagaaccccaccccccccgcccccccaaaaagcaataaagatgtctaaaagcttccttctgggctttcgaatgatgtttaccccaggcatttgttctattcgttcatcacccattttccctacaacttgcctacacttgatatcagatttttatttattagtcacctatcttcttcattggcccattttcctattttgccactggttgttctcaaatgtgttatgattcctggttgtacagtcaagtggttgataatcttggatatacgataaagatttgctctgtagctgtgtgtaagcctatataaaagcttttgtatttttcttcttaaaaaagacaaaagatggttgggaagatccctccagttcaccagttcgaggctgcagtgagctatgatagcgccgctgctctagcctgtctgtctgtgaaaaacaaggggggcggggggcgggggggaagactggagatgtaaatctcccgcagggccctacccgtatccgcaacaggtctctaacaggaacagcctcaggcctgtgttggaacaaggtaggttacagaaatctggaagccagatctgtaacttcagggtaaggactggctctcagggctgatcccccgggctgggtgtcccagaggcacccgcccccgccccttccccaaggcaggccaggacaccttcactcctctccttaggctccccacccccttctcctccccactgtgcctcctggagtagcggtggcggtgccacaggggagcggggcggggcgggctctgagggcaagggggatgggccccgccggggtcactggcggccaccctggaaactcgacgcaggccggcccttctagtgaatcgtcccagccacagctggcctcccagccgcgcttggggcgcctcggggcgcgaatggtgcaggttggggagactcaccacgcaccgtcgggggtcggtccggttattcctcaccgctcggctccagtgggcgcgcgggcctctcctcctcagttcctgcgctgcagtccctccctcacccttcgcagcttgggaatccaactgtgtcattccgacggagcgccgtgaggacctccgagggtgttagcgccaagtgatctctgtccagcgctctgaatatccaagtaaaggagttcaatgaagggcgggtcaacggaggagaaaccgtgactctctcaagggagcccaaggcctccttgtctaattagtgacgcgccaatggatggaggctcttcccaccatctcttcccagcatccagtgacaccaccgccaagggacgggctcggcggaacctgcaggaaagaagcatcggctgagcctgactgcagcgctgtgaagagacaggggaggggatcagtagttggtcccgcgcccaccccctgtttccgcgaggggcggagttgactggccatgcaggcagagggcgaaatgtgaaattccactactcctaccgtttttccctgacccgatggggcggagtgtcgtcaggctaagttccctggcggtaaggtggggagattgaggcgcacacctgccgaacggtaacgcaggattagctaaggcgagctcaggacagaagcctcccgaggagcaggagggcaaaataataaataaataaataaataataaataactcactccttggtctttatttgcggcaggaattcagaaggtgaaagcggggccttaggatctttctgaccttttgggttttaagcaggaggtgtcagaaatgttaccacagggctagctggcttgtggccagcaagcgttcacaatgccctcgatttttcatccctctctgtgggttctttttttcattgtaaggcagaatttctacgattgctcacccactcagagaacctgagctggtttagaccaggtgagacaggctaggtttaccctggtgatgatgtgttgttgccatggcgatcctgcccagtaccagaggccctgcagattcagatgcttggtgcctgtgcttggctgaggggccaatgggtgaagctgccatctgcgggatgatgactgaagcctctaagtcagaatccgcccaggctgagccttagggcagctccatggagcctcggctggcctgggatagagagtccaccactgtgccagcccccagccactgcctaggtcctgtgctgagagccccttgtccagggaaatggcgtccagtggaaaagggaccacccccttgcccttcactcaaggcaggttggtgacaaccctgaagctaatccgttcctagaggagctgcttctgggtccgagttttctctgcagcagagcagctccctggatgggatctgttcaaagtccgcctttcacgcggaattttccgtccttgcaattttccacctccaccactaggggatcctctctgaccgcctcatgccggctctggcctctgagcaggggtttctcttctgcatgtgcgaccttgcgcatgcctagtggccttttgggacctagagctgctccacaccccgatggggttacagagtgcctcgcctccactccaccccaccagggttccttccctggctgggatgggatttcagaagcgccgaggaacagcccagacaggtgtgggagagtagccaaggcccctgtcccggggtggccaggacagcggtggcctcgcataggacctggctgggctgctgcaatcagtgtcctgccccttggagagcaacagtgaaaacaacaagactatcttcacccaccttaagaaagaacagaaccagtatccccaactctgctgtgtatcccaacccaattccattccccaccccactctcagtagccaatatgcaaaatattagaatactcttactgttattattttcaaccacactctgcatcctgaaaaaccatatatttcgttatgtgcttttaaacttcttgaaaatgaaatactgaggctgggcgcagtggctgacacctgtaatcccagcacttcgggaggcggaggcaggcggatcacgaggtcaggagatcgagaccatcctggctaacacagtgaaaccccatctctactaaaaatacaaaaaattagccgggcgtggtggcgggcgcctgtagtcccagctacttgggaggctgaggcaggagaacggcgtgaacccgggaggtggagcttgcactgagccgagatcgcgccactgcactccagcctgggcgacagcgccagactctgtctccaaaaaaaaaaagaaaaaagaaatactgaattttcaaatacttgctttttttttcggtcaaaattatgttctcaaatttcactcctgtagatgtgcgtggctggctgtagtttttgcatttttattattaggtattctcctgttgcattaatatgccacattttatttctctcatgtttttggtgaccacttggggtgttttttggttttgtatttttgctgtatacatgctgccatggtggacatacctctttatacatatttcctgttgtatgcagacacaattttaggatgtgacatcttcagcttttctattgtgtcgtgtgtcttttccttcgtgctttgtgttatttacatattctggacacagattctttgtcaactgtatgtgctgcacatctctttcccagtttgtgtcttcttcttcttttttttttcttaaaaaaaactttctttatagtgttttttttttctttctttctttgttttgttttgtttttttgagatggagtcttgctctgtcacctaggctgaagtgcactggccgatctcggctcactgcaacctccgtctcctgggttcaagtgattctcctgcctcagcttcccaagtagctgggattacaggtgcctgtcaccacacccagctaatttttgtatttttagtacagatggggtttcaccatgtttgtcaggctggtctcgaactcctgacctcaggtgatccaccctctttggcctcccaaagtgttgggattacaggcgtgagccacagcacctggcctgtgttctttcttaagtagatgttacttttaatataatagaatgtatcatattttgcttttatattagtactttttctatctaattcaaacacatccccaagggtctttgtgtgtagactgaccaatttctcaagaatcatgaatgaatactgcttctctttccccaatttatctgtaatgctacctttattataaagtttctatgcatgtgtagaaatagttcctgatttttcactctgtgccaccagcataccaatagcacgctgtcttaaatattaaatagcagagctttatgagacaacttgatgtgcagtaggcaattgcccccttgttactcttcttcagggttctttgttgtaccacatgaattttagaattggcttgtccagctaaaagacaactgcaaggattttatttggaagttcataattctatacataatttggggaaagtattttcataataccaagtcttcctattaatgaacacagactctctctctctctcccccacccccacctgtttagttatttatatctttatggtctgttagttattgtttattgtctttcaaccaggtttcatgtttttctacatagaggccttgcatgtgaaagtctttcttcctagcttgctattacaaattttttttaattgcactttttgggtacagtggcttgtactgtaatccccgatacctgggaggctgaggcagatggattgcttgagtccagaagttcaagaccagcctgggcaacataatgaggtccctgtctcaaaaagtttgttttaaaaattgcatttgctgttattcaacaaatgtcattgtgtctcatatatggatttttatatctgataaccttgttcaacaatcttttgattctaacaatatatcagattcttttgagttttccatatagacaataatgtcatctgtaaattataattgtttcttctttgttatttcttggaccttttattttatatttttgtcttgctgcaaggcaatatccctctatatattgtggggtcttttttctcataaagtggggatggtgaacacccttgtcttgctctctgattgtataaagcatgctttctgtagcattttgtagacgctcttttttagattgaggtaattcacttttatttctggtttactgagtttttagcataaattcaggctgaatttgagctaaagctttttctggagacatcatttgaaaaattcatatgatttactttctttaagtcaccaaagttatgatttacattgaactgagtttctactgtttaactgtattcttgggagaaaacccacttgtcactgaacaatatctgttttatttactgctgtcttgtgtctaaattttcttttaggattttttgtatatgctcagattagcctgttattctcctttctgtatttttttctggtttgggggtcaaagttataatagcctcacaataagagctaagaaaccagccctaatggaggccggggcaggaggtttggagttcaagaccagtctgggcaaaatagtgagacccccatctctatgaaaaatagaaattagccaggcatggcagtgagtacctgtagtcctaggtacttgggagggtgaggcaggaggattgcttgagcctaggaatttgaggctgcagcgaactatgattgtgccactgtactccagcctggatgacagagcgagaccctgtctcaaaagaaaaaaaaagaagaaataaaaaggaaaagataaaagagctaagcatctgtttccttttttccattttctgggagagtatgtgtaagactgtaattaactgtttcttgaataatgggagaactctgtaaaataatctggctttggtgttacctgtattggaaggatgaaaaataccaattcagtttcattattggttgatagggctactcatgctttttgttttgttttgttttgttttgtttttgagaggaagtctctctgtattgccctgttgtccaggctgagatgcaacgttgttcacaggcctgatcctggctcactacagcttctaacttccgatctcaatagatcctcccgcctcagccttcccagtagctaggactacaagcatgcagcatcacatccagcctcttttcctgcctgacccagttctggtttcctttagttttctaggtgttcatccattttatctaatgtttaatgcatttggcataagggtgctcagtgtcctttcattgtctgttgtctgtaactgttgccattttcattcctatttatgagtactggcgtcttctctcactttttcttaataatcctgctggaactttgctttttaaagaacatcttttgacttgttgattcttttttcatacatattaactattttcttattttttgcctttatatttatttcttttcctgtttgaaacattgctcttttcttactataaaaatgggtaagtagctcatgaattaccacctcttttaaaaatcttttctactgtaagcattttagcagtttacatttgcccacaagtaccacttcagctacaccctatgtgcttttacataaagtcttcatttttggtaagacatattctcaaattttaattatcacttgtttttaaatccatgatgttttatttgaaatgttgtttctaaagatacattttctggttatacttttattcttctaatttagcacagtggccacaaaacatggtctgtgcagtgcatacaatcgatgagtaatttctgagctgtagtatttggcataatatatggcaaaatttcctaagttttccatgtgtgctttaaaaaacttccagtaaaatacataaatctgttagatcaagcttctcacattgttcaaatagtctatatgtttactgattcatttgactgcttgatttatcaattacaggtaggaatgtattcaaatctcctattaaagtgtgacactcaagtggctttttaaagacagagatgccaaaccaatgaatacatgattttccccaaagcctgcacaaattctctaatgaaattttaccatgaaagtttgtttaattaaggcttactaaagcagtatgttgtcttttactttttaaacagagaatatatattttaatacatcgtttaagtttatgattaattatctattactgaggataagaatctttgcctgtgctcattcagcatttgcacttcatttatgatctgccttctcatagcttctgttaatttttatactagagacatttatttgtttgtataaatgttgaaggtttttttttgttgttgttgtttttgagtcagagcctcgctctgtcacccaggctggagtgcagtggcatgatctcggctcactgcagcctccatctcctgggttaaagtgattctcctgcctcagcctccagagtagctgggactacaggcatgtgccaccaagcaaggctaatattttgtatttttagtagagatggggtttcgtcctgttagccagggtggtctcgatctcctgacctcatgatctacctgcctcggcctcccaaagtgctaggattacaggtgtgagccaccgtgcccagctgggttttttatattataaggagatgtaatagatagatagatgtttcaaagatagtcaaatgtttttaaaatttaaaacacttttttacaggttgactttcaccatttaatttcatctatgtgttttgccttagagaaattttaaatgctatgtagatctcatgacttataattatgaagcattttgttttctgttttccacgaaacttagcttaactttgagcatataatagttgtaaaggtaggagagtaacactgaaaaaaggaattgcataaaaatggcacattttctgtagagttgtttatcgcctgaaaataggccccatttcatggaagtaagatgatcaggctcaggtccccagacgaaactcttggcatggtttttggagatagtccagggctcagtactggctctatcatttgctacttctcccaaagtaaccaatatctcatccaccctgagcccatttccatatctctaacatgaggataatagcatctaccttacacaccaagtagagggatcaaatgtaggaactaaatcaaagtaccagcactgaataacctacatcctcccacttcccaaaaggaagagagatgtatcccctgttgacaaacgagaccattttgcaggagagaaaggaaatgccagttcacttgcaatgtaaacatgctctctctttttagggatgtccagggacctgagagagaacccatgcttaccaaagagtttctagttccagacacacaggactcgaagggtgacaagtatggttttcagggtccctgaatccacccagtcctcacagaaactcctaaaagctgtcgattgacagcgttgagttcacagctctggtcctcacatgctgatactgcttgtgatatcgaacccgacaggaccccacatcacaattgatttaccaactacaatataatacctcctgaatctccaaattggctcacccaggaacaaaggcttggggtaaaactggattaggagatataagctctgaattttctgagggtgagacacacaaggattctaagtgacacgccacagagtaacgggtctgtgactggaggacccacagatttgtcttactggagacaccacatgcacacaaactccatccttagctgtggaaacaagggtcttttgctatcttagccgaattctgggagtaatttttggaggggaggagatctttgggattgcctctttcaggccctttacaaaaatacctacttcttaaatggtaaagcttacactaaactgaaaaaattacatccttggctttttatgaagtaggtgttggattgaatcactactggaagaagtatggcatcgcaaattctaagcagtggtcaaaggatggatctgttaaattagaaaaatctctaaatttataaaaagattttagattcctttattctaaacaattgacctatttgtactcatgggacaatcaaatttcaaaggagatatgtaacgatttcatggcttgcattaaaaatccttctgataaaattaaagataaaaaatctgaccccctgccaaaaaaatcttttgaagttcatactgcctgctttcaatattctgtgggattcacaatgaaaggtgccttatattgtggcctagcttcaagtttatgccttcgccaccatggcctgggttcaattcccagtcagggccccagcgcctttggtttaatgtttgcgtggcatttgacttttttacctatttagtattggtgagattacctttggtaaaaaaaagtttaaagagtggaaatcgcaattctttgtgttggctaaaatctgattataagagatctggaaggttttatttttctttttcaaagagctctatggtcagaagtcggcttcatgaaaagctaatatttaattatatgtacatacagtctttctggattttctcttttgcctcctgttttgaaaaatatttggatttgagtgaaactccgttttagaaattaattgcttggtacaatatacccatgtaactaccctgcacatgtaccccctgaatctataataagagttgaaattttgacaaaataaaattagattttgaattaaaacaaataggtgcttggttcctctgctcacttctttttaaaaggaattcctctcccatgtacttcttcttttcccttctttaccttccttttggcatctttggtatcacatgaagggatctagagggaattttaagtgactctgaaattccttgagaaatacacaaaaagatcccactcaccccttttgggggtctcctgttctccttgtggagtccagagtcagggacaggctcctccaggtctgcagctctgctctcttttatttcatcttggctgattgctttggttttgtgagtaccaggcattactttgtactgtgagagacacgtcctttgtgagtgcaacggctgctgggtcactggtgagggctgcagtttggagatggctgagagccgttgcaataaatggttgtgattgcagggggctccttgtttctttgcaagtttagatgagaaaggtgcagtttggacacagtttaaaggctgtgaaaacaccaccaatgaatatgatttcctttggggatggtctgattaaaagtgggctgattgttgctgtgctactagccttgaagacatgtttctacagcattgtgcagtgtggaaaaattgtgtggcttggtcttgtggcatgtcccttcttttagagacctcagattcaatgtgaaattcgggatttttgattttcaaagatctagatgccctgccttccagatgtgcctactcttcacatattttaaaattagatcctataaactgcaaatactttgttggcttctgtgagatcagaggtccagttagaaaaggaagacagtttgttaaaattaaaaactatttatctaatctaactagattggcctccaaatatgactttctgacattcagctggttactctgaaaagatttctaaatctcttgaggctcatctatatgtttccttgcaaagaaaaaaaaaaaaaaaaaaaagcaagcccaagcactagtaagaaaaagatttgcaatgtttcatgaaaggagtagatgagtgaagcatttatttgtagatactgggttggatacctgtgcaaagaagaagaggtcaataataaaaattgccaggggatttcttggaacttaacaagctgaattaaatatagaaatgtcaggaaatcaaggcaggaaatactcacttgtggttaggcagacagggcagggttctgagcttgagatggagcaaacagttgtggtgggtgaagttcacatgctttagagctcagctgtcctagtaaagaagcctaagagtctctaaagctcttatgagaagatggattttttttgcctagattaaaaggttaaagaattgctttaagttggataaaataaagctaaatgtttaagcaagttgtgaaaggtttatgaaaaaattaattaaaatatttttgtgtgtaaacatattgactaaagttgaaggggtataattcagcatttctgtaaattgagcattgaaataaaaacacaatgggtttctcttagagcactaacctgctctttaacaaaaattgtaaagggttatagaaagtctataaaaatgttaccttatggtcaaacattaaaattgggtaaatatgtctatcaggttttattaagaattaggtttaacattaatagtacactaatgtaaaggtgaaatttggcttatttggtacaaaaatcatacaggaagcattgtgaaatataaaatgatttttagctttctttgggctatatttctataaatatgttattgatgagggttccaaagttatgggagactcctataattctgctatatctcagtgtacattatcagtcataattataattgtcatgttaaattattgtgggccacagaggtaacagatttccttgtcaattgtgtctttgactatgactaccctaaaacgttcagtcacccatatacacatgttaccttgttttggccctctttagaaggtaattttataatcagctataaagccctaacaggtgctcttaaatgcaaattttgataactttggagattgtgacatcagaagagaggaaaaatgttcgggacacttggagagctaaaatgttcattgatatcaagcaggacaggaattaactgcatgaagtgaactaataggaggctgaagtgatctttttgactttttgcttaaaacgttgctgatcctttgttttgcttttcagagtcaaggcaaattttcttttgagctattgacagcttttaacgattaatcaaaatatactcctatgaacaccatttggagcattatttgtttctctctacccgatttccccagaatttggaaactatttgtgggtattcttaatttatggcaatatagttatttgcataagtgcaataagaatgtgttttctttggtaacaggacacaatttgaaaaactggttattttaccaaggttttgaccagaatgctgtgctttcctttaaggaatcaaacttgacttgtggagctaataaagcctttggaaaactgaccttatatcctgtgaacacagtccctgtacagggttactgatctgtgggaagaaaagaatgtcacattctgacaggtcaggaatcccaagttatcttgaaacttcaagaggacaggaattcacccaaccatatgtatttgatggtagaaatccatggcaggggctcagctttaaaaagtcttatctcagattccttctataaaacaaagtcccattaaaaccaattttaaaagcctatgtgaaaaataattattcttgctgcacctcgtacaaataaagtggcaaagcataataaagcaaattggtcctgtcgtaatttgtctttagtaaaaacgggaaactggggtcgggtgcagtggctcactcctgtaatcccagcactttgggaggctgaggtgggcagatcatctgaggtcaggagttcaagaccagcctggccaacatggtgaaaccccatctctacaaaaatacaaaaatgagccgggcatgatggcgggtgcctgtaatcccagctactcaaggggctgaggcagggaagcggaggttacagtgagtcaagatcgtgccacttcacgacagcctgggtgacagagcaagactccatctcaacaacaacaacaaaaaagggtaactggagagagggaagttatgtttcaaaaacttttggaaactatagtacacctgtttttaaattctagtctggcattcagtttttattattttctacagtttgggttaaattcgtatttctctggctacaagtctcctaaataatcttttcatttgtttcctttttctttccctttttccccatttttcttaattggaaatcactgaaacctaagctgtgctttcttaaagccctgtgaactgaagactagacaaccgaaacttctgaaggaagtagcagcaacctatttatatgtgttgctgttgcctactattatgttttagcaggtgctgcctctacacccccgaaacagagagtgctactgggaacaaatcgactttttccactccagtgctgcattcggtgccccataacgatgaccccctctcagcaggaagtagccagaaagattacaatgctccatctccctatgattcttgtgataaataaatatacaagcatgatagaaatcatgcgcaaattgacagtggggattgtggcaggccagatttcactaatggaggtccccatcacaactacttcagtactgactgagtggttaagttcagtatcaaaagctgaaagtgccagcgcctttctacaaaggctagaatgtaacaaaagcccaccaagggttttacctaggcctttcctgggccttacagcatgacaaaacaaagaaggaattcttaaccagacctgtttaggattaaacaaatttaattgggggtctgaagaaactcgccaggcctccacaaacaagttcattgggggtctaaaggaaccccccccaaacctctgtgattgagcaggagacaaggtcagggtaattgccccagcacctggactcatttagatttaagtaaatgtactgaggctccagagaaaggtctccaagacttagactagagttacagattaaaagaagttaatcacttatatctttagataaatgcacactgacacgtagacatacatcttagaaaatatataagctctggaaaaccttgtaatttacagttggtctggagatattttctgggccttctctctgtaaccggttccagaaataaaaaactctcttcctccccagtttatctgcatctcgttattgggccgtgagaaatagcagccagaccctgagtttggtctgggaacacactggctgggcttcctgcctggcggtagagcttcactgtcctccttcccagccaaaatgtggcccttgaaggcttcctccccaactgaccggttttgggttctaggtactcagggaacaccgtcttcaaggaggccattttcatactgttcctggtttgatttttctgaaattaggaaatgccccttgaggcatccaggattgtctttatttcccctgaagcttcccctcctgaagaaaaaagttctcaaacaccctcaggactcaaaccccaagttcaccctgtgaaacattcccatttcctaaacccaggcaggctcatggccctcagcctctcagaccccatggaaacctcctcccccacttcacgggttctctccatattgagagcctcccctcctcggcacacaacccagagactcaccccaacatgtgtagcaaatcaccctggaaacaatcatggctgaacgtggtagcccatgcctgtaatcccagcactttgggaggcccaggaggtggatcacctgaggtcgggagttcgagaccagcgaggccaacatggtgaaacctcgactctactaaaaatacaaagttcactgggcattgtggtgtgtacctgtaatctcaactactcaggaggctgaggcaggagaatcacttaaacctgggagacagagattgcagagagccaagatcgcaccattacactccagcctgggcaagaagagtgaaactacatctaaaaaaaaaaaaaaaaaaaggaaaaggaaaagaaaaaaaaaatcatgaggcaacattgcatttaacaatattttatttatcaaaagacacttgtctttctcaggtaagtgaaggtctagagatgaaacgagtcccgatgtaaattgccccatgggcattgctgagatcacaagatcatcactgcagcatgcagcacaatagtaaatttctcaggatggaagttcaacaatccaaaaggtagtattttttttcatgatgctcagtccatcatacgaaataaaaataaattccttttcatgatcatccattcagtagaaaaaatgatagtaaatttgttctcatgaagatttttaccgtaacatataggatttatcgttattattattattctttgttttttgtttttttgaagcggagtctcactctgttacccagtctggagtgcagtcgtgcgatctgggcacactattaacctccacctccagggttcaagcatttctcctgcctcagcttcccgagtagctgggattacaggcatgcgccaccacacccggctaattttcgtatttttactagagatggggtttcaccgcattggtcgagctggatttgagctccggacctcgggtcatccgcccatctcagcctcccaaagtgctgggattacaggcgtgagccaccgcgcccggcctcaatttatcattattcacgcatccacaaactgggttcttatattttgtacgtgattttttccattgaggagagatatctgtgcatattcatgctgctcatatttcatccacaaactcggttcatatttcatccacaaacataattttttccgttgagaagagatacttgtacatatttatgctgttcaaattcacatttcatcattcttttacaagaaatagataatgtattttaaggttttccagtggtattacagatattttactgggtgtatagatagaaattaaaccaaacttctttgttctggccgccagtcatgcatcctgttttcaacatagttcacatacaactggttgtgtaaaaatgaaattattttgtttagtacaatcatcaacagttggttgattagatttttaattatcaagttaatcattgtcattatgcttctcatcgcactcgtcattaattgctgtgggaggaaatttgttatgttccctatgagagggtgtatcacaaattcaaataagaattcaacgacaatggactgtataaaggaaataagcaagtccatggaaaacatatttttttccggaaaggattaaaatatttttaaaaaggaattaaaaaaaaattgggcacggtggcaaatgcctagagtcccagctgctcaggagatggagacagaaggattgcttgagcccaggaataagttggaggctgtagtgaacagtgattccaccactgtactccagccagggcaatagagggaaaccctctttctaaaaagacaaaaagaaacaaaacaaaacaaaaaaacaccacatcaaaaaacccaacaacaaaatgaaaaaccaaataacagcaatacaattggagctattcgatccaaagaagtaaatgaaacataaagcaaataaaagagaaaagctaatacctgtgtcctgcaggactcagtccaagttctgctctgactccctcctggtgagccaccccttaaaaagtcacttggggcggggttactttgacagacagtcttctgtcaaagagggaggcggtaaatagcacttttttttttttaatttaacgcctttccaacaaattagcggctatgttgtctaagagtgcaaatgtcagaggtgggtacaggcagcaagaccctccccacaggggcagcagaaggaggaatgactaagggaacaagactttagtgtgctcaactacacaggacaggaaacagatgctttttacaaaagctggtggacttgaaggcagaatattttcaagttcctgtaactgcgaactatgacctgtagcctgtgagagtgactttctgtggcaaaggagcttttgtgaatgtgaggaagttaattatcttaacagtgggaggttctcccggcttatctagctagaccctcgtgaaatcccaagtgtccttaggaaggggaagcagagagagatttgagtccagaagaggaagaaggtgatgtgaggcccagtaggggaacaaagggcgatggcatgtaaacacttagcccccagaagtgggagagggctggggttcatcacaccagaatccctaacaatcagccttattttaattacccttgaaatggaaggaggccttagagagccagaggcttggaggggcaccctctgctgcatacacagatcccaactgctgtgggctccaaataattgcaccagggaaatcacaaattatcaaaaataaaggatgtaaagcttttaaaaaatattaaaagcccaacaaataaaaaaagttctaaatctataaaattgacctcagtctgtatatttagatgagtcatgtgtatatagcgtttcacttcaaaatatatgataaatctctcattcattggcttaaaaataaacacttcaatcaagtctttatcagaaaaattgaaacgttaactcaattgccttttagttcatgtgactttacaaaacttaaaacaataaagtcagttttaaaaattattagtaaagtaaaagaaaaatatcttcacaatgtagacattttgtccacatgagacatgtgaaatattgccattactaaatatttgcaggtcaaaaactgtttccaaaacattttaaataatcatctggcctgtctgttttagagcattcaattctagctgaggtctggggacatgtgaaaggagccacggcccgactccgtgctgggaagagtcagacattttccacagctctgtcctttgctgtgggctctgcaactcctaccaattaaaattgcttacgtttttgttttatttttactaaagaggggttcctaaaagctaacattatactgagtatatgtaactaaaactactaagaaaacaatttcacaattatacaaatgtgccaagtaaatgaaaaaataaactgtattttaataaaggttataaaaagaaaaacatatagtggtgtgaggactgtctcaggtcttcactgagcaagggatcatgacattctatggcggacagctgaccttggctttctgctcctcttgattatgtctactaagtgacatacttactctttttccacctgtcttgcctctaagggtaacaggttttatgagatccctcctagtgctttgcaggtcagcctccctttgctgcattccaattttactgcctataccctccagctggcttttgatgacaaaagtcctggtcccagccattctcagattctgtcatccccgtgggcactatggagctcagcactatgggaggttccccaaaaatctcgttttctatgaggaatggccaccacctgcatctcagtgatgctagtgacccctttcctactcctgtgctcactggtcctcatgaagatcctggttggtctgtagccccctatttttcctattaaagagaaattacagtaagacccatttgtgtgcaaaatcaattttaggcttattacacttggcctgataatttgcataaaatgcagcaagaattcatcggccatataggctacttttgagttaattttcctgggtttttacctaaaaatatactattttggttagagtcttgtgaaaataaccaatgtgttcaattgttttattttaaaaggctcttactgaacactataaatatgtataagttgaatatacaaactatattgtcataaaatcacaacccaaaatgtggagaacgcagagggaaaggtaaatttgctcgcaaaaacatacttcacccaaataactggaaaaaaaaaaagactttcatgacccttctttaaccagagcagcagctttcaaacaaggtgtttgccttggaaatgccattcacaagccaaacggcccttgagagctgtctgtcaggcactgtagaatctagcagctcctcacagagttagaaatagtttcaggaaagagattccctgcttttagtaactgcactttatattcccagatagcgagattgtatgtaaaccatttttatcttattctggaactcttttgggtactttttttttttttttttaaatgatggagtctggctctgttgctcaggctggggtgtagtggtgcgatttcagggtatgagaaaatgcagctggacctggctctttccaggaagaccctcacagccaaggagtccaaagcctggggttttcatctaattccagtgtgactggggtaggagcagctttggtgctgggtgtgtgtgtgtgtgtgtgtgtgtgtgtgtgtgtctatgcctgtgtctgtttagggtgttaggctcgtggttgtctagatacaaatgtcccagggctcaggagccccagggttatgtcaggggcaccagatgaaggtgtcaacagaagttagggcacaagggacaaaggtgagagcaaggttagattcatttaggtgcaagaaatcatagagggaggagggagaggaagccctcctgctaccaccgaggaagaagcgcagcttaaggcagaaagcctgtccggagaggaagtgagtttgagggcagggctctctgggtaaagtacggtctgggacaccagcctgggggaagggtacagaatgcagagtggcctggcgtggggactaagaacagaggagagcagctttcactgggagggtcagtgttttcagtgtccagcactgagcaaggtgagatttgggcagcttgctgtgaaataaggtcaggctctggcattgtccccattgcgtgtgtgtgtgaggggcactttgggagagtgaactctccacctccatcctctcatacgtccttcaaccgagcttgccagttaccctgattccaaggagatctatttattgttgacaatactggatcctagcagaggctgggtaggagcctgggcacaagcaagtggaggagggggcctgggcctgaaagacctgggaggtttgagagaggacacagcccacagaatggagcagatggggtagagtcggcaagcattcagggctcctagtaagttggacaatggagaccctgaaagatccagtaaaacggggagaacaaacaggtccccaactcacatccttgcagtgcctggagcttcagactccagacaggtggggaaggaaaattgagggatgtgaacatgttggagaatgtcgtgccctgaagaatgaagaaaaggggggtgaggaatgagagcaggaacggcttccagtgcctggtgcccaggagaactcagaaaatgggtgtggtggagaggaatcgaggaaccggaagtggtggaagtgtgcagggcccctccgagatcactgtgactgccaggcgtcctccctggctggagagcttcactgtcctccttcccagccaaaatgtgtcccttgaaagcttcctccccaatggactggttctgggtcctatatatttgaaggggtggcctgcctctccacacctgtgggtatttctagttgggtgggaggagagacagagaaaagaaataagacacagagacaaagtataaagaaacaacagtgggtccaggggaccagcactcagcacaccaagggcctgcaccggcaccggcctctgagtttcctcagtttttattgattattattttcattatttcagcaaaaaggaatgtagtaggagagcagggtgataataaggagaaggtcaatgaaaaacatgtgagcaaaagaatctatatcataattaagttcaagggaaagtactatgcctggacgtgcactcaggccagatttatgtttctctccacccaaacatctcagtggagtaaagaataacaaggcagtattactgcaaacatgtctcacctcccgccacagggcagcttttctcctatctcagagttgaacaaatgtacaattgggttttacaccgagacattcagttctgaggggcaagcaggagacagtggccttcctccatctcgactgcaagaggctttcctcttttactaatccacctcagcacagaccctttatgggtgttgggctgggggacagtcaggtccttctcatcccatgaggccatatttcagactatcacatggggagaaaccttggacaataccccgctttcaagggcagaggtccctgcggctttccacagtgtattgtgcccctggtttattgagactagagaatggcaatgacctttaccaagtatactgcttgtaaatattttgttaacaaggcacatcctgcacagccctaggtcccttaaaccttgatttcatacaacacatgtttttgtgagctccaagttgggtcaaagtggctgggtcaaagtggctggggcaaagctacaaattaacaacatctcagcaaagccattgttcaaagtacaggtctttttcaaaatggagtctcttatgtctttcctttctacatggacacagtgacagtctgatctctctttcctttccctacatatattcatggaccacagtcttcaaggagtccatttcctcactgtttttggtttgatttctctgaaattaggaaatgccccattgaggcacccaggattgtctttacttcccccagagcttccactcctgaggcaggagcttctcaaacaccccccaagactcaacacctaatttcaccctctgaaaccttcccatttcttaaatccaggcagggtcatggtccttagcccctcagatgctgtggagaccttctttccctttcatacattctctcaagattaaaagccacccctcctcagcacacaccccagagactcaccccaacatgcattgcaaatcaccctggaaacagtcataagaccacactcatttaataatattttatttatcaaaagacactctttctcaggtaagtgaagttctggagaggaaaagaggagtcctgatgtaaattgccctgcaggccttgctgagatcacaaggagattgttactgcagcttgtagcacaatagtaaatttcttctctggatggaagttcaacaatccagatcgtagtatattccttttcattatgctcagtccagcaaatgtgatgataacaaattccttttcatgatcatccattcagcagagaaaatgtttgtaaatgtgttttcatgaagatgtttaccataacatacaggatttaccattatcaatgcatccacaaactctgctgttgttttttatacataattttttccatcgagaagtgatagttgtacatattcatgctgttcatatttcaaccacaaactctgctggtttttttatacgtaattttttccattgagaagtgatacttgtacatatttgtgctgttcatatttcatgtttcatcatccttttacaataaataggttatattgtattttaagtttttctaactgtagtgcagaaattgtactgggtgtatacatagatatcaaaccaaatttacttgttctggctgataatgcatcatttatttcatagattatgtatttctttgacacatttcacgtacaactaattgcataaaaatgaattttcttttagtatagacatcagcatgtgcttaattcggaatttaattgttgagttaaacatcgtcattgccttttccgttgttattaattgctctggtgggaattttgttatctcatacataagacagtgtgccacaatatctcttaaaatttcaatggcaataaactttatatttaaaaacagggaatctatggaaaacacatttttttctaaaggattaaaatatttttttaaaataattttctaaaaagttaggcacggtagcaaacgtctagagtcccagctactcaggaggctgagacaggaggattgcttaagcctacgagttgggggctgcagtgaactgtgattgcaccactacattccagccagggcaatagaagttaaccctttttctaaaaaaaaaaaaaaaagaaagaaagaaagaaaaaaagcaacaacaccaaaacctcaccaacaaaatggtaaagaaaaaaaaaacagcaatacaatgtaagctatttgatccaaagaagtcaatgaaatttaaaacaaatgaaagggaaaaagtaatacttgagtcctgcaggactcagtccaagttctgctgtgcctccctcacggtgagccacccctttagaagtcacttgggtcataagttaacccgataggaagtgtcctggccaatgaactagggaggtggtaaatggcaccattttaaatttaaattcacggccttttcaacggatcagtagccatgttgggtaagagtgcaaatgtcagaggtgaaaagaggcagcaggaccctcccctagtgcttgggcaacagaaggtggaatcactaaggggacaagactttagcatgctcaagtacacaggacagaaaacatgctttttacaaaagctggtaaatatgaagagggaacattttcaagttcctgtaaccaagaactaccgcctgtaaccggtgaaagtgactttctatggcaaaagcgtttttgaaaaggtgaggaagttaaatatcttaatgttgggaggttcttctggtttatctggctagaccctaatggaatcccaagtgtccttatggagcggggagcagagagagagatttgagtccagacgaggaagaaggtgatgtgagtctgggtgcgggacagggggagaatgatgctatgtggggatctgggctggggaatgacttagctgcatgagcggagtgacttagactcctgaactagaagaaatctagggctcatcacctcagcagccctaaccatcaaccttatttttattacaggtcttccatcgacggactccctaaaaagccagcggcgtggaggggcgccctctattggacaaatagatcttgactactttcggccctcaaatagcctgactaggcaaataacaaataataataatttttttttaaatcatggaaaatattttaaaaaacaattaaaaagttataaatctataaaatctgcttctgtctgtgtgtctgtatatttagatgtctcatgtgtacataatgtttcactaccaaaatatatgatgaaaccctcattaatcggcttagaaaactaaacacctaaatattttctcagaaaatacaaaaactttaactcaaatcccttttaattcacctgactttaaaaatctttaaaaaataaagcatgctttaaaattattagtaaagtaaaattagaacatcttcagaatttagacatttggtttaaattatacaggtcaaatactgcccttagtaaatattttcaggtcataaacaactcctgtaatcttttaaataattgaattacatgtctgttttagagctttaagttctagctaaagcctggggacaaatgaagggcaccatgccccctctctgtgctggaaagagacattttctacagctctgacccttgcagtaggctttgcaactgctacctatcaaaattgcctacatcctaagtttattattaaaaggagttgcttggagttaacattataatgaatatatgtaactaaaactatttctcatacaaagtatatgaaaaagtagaatgtatttttaataaaaagttataaaaagacatgaacatgtagtttttataaaaaacagtaattttgtctagttttgcagttctaaaaagttatgttaaattcaaaaataaaaaataacaagacaagactcaaggtttaaataagttgtaaaagatttgtaaaaattagttctataaaaattttacaaaaaaaagcattggttaaaatttaaggaattattttgtttttacagaaattaaacattcattaaaaacactctgatacaaggccttaatttgggttcatgtatcagaatagcagggttttcttagaatattaatctattctttaaaagaactatgaatgttatgcaaactttataaaaatcttaccttagagtcaaactgattaaaattccatagattttacgtaaaattttattaaaaattaacttcaacaaaaataaaatttgattttctcctttaaacaaaagttttgcgtaatattaaataataaagcatttttgtttaccttttaaactataaacacacacacacatacacatacaccaacactaaagtcagctgacctcatactgtctttattggatattcttgtttaaaaaactatcttctttggaaaataaagttttttattttaaaccatattttaaattatcattttgactaaatccataacatacagtgatctgtaataattctattttataatatcaagtgttttgaagaactccaggaacagccatgagagaacactgtggtttagtaacactttatttcctcagtttgaaaatagttgtctttcttggggaggccggtttcagcagatgaaaacaagagtcatgatgaaaattacccagcagtggttagtgtgaccataggaacattgtcatcaggtcagcagaaaacatatcagcaaatttttctcatactggcagtgtgtaggggtggatgtttacagttcctgaagccccagtggtcgtgtggtcttttagttttgccatttataggcaacttgtggtaactagctcaattagacacattccttatcacaaggacagagggctttctgtatcctagggttcttgccttggcattccagaagaatcaggtcacacgtggacgtggagaatgagtgcaaggttttattgagtggaagtagctctcagcagatgggggagccagaaaggagattggtttctccctggattggggccgttcagcagccctggctctcctctgactgccccaggcaaaatccacatcgttctataagtcggtgccctgctggtgtgctggtgcctgttgtcatgttcctcttcatgtccagccgcctgtgtgttcctccgctgatgtgctcctctcgacgtcaagcctcctgtgtgtctgactgctagggtcttggggtttttataagcacaggatgggtcttagcaggccaggatgatcttgggaaagacaacattcggtcaggaaaacaaaaatgcctgttgtcatctaggtccgtggggacaagcccaggtgtggagcttttagccagggaccacagcctcctgtatccaacacttcccttcaccttttctatatcattcaaagggatcatgcccttcccatcccagcacttcactttcatgtcatttgccccctctgaagaggtacatctaactgccattagaatatggatgatgaccagtcttagctgcttcctgctgaaagggggcattgttttgggggaaaacggcagtcagattcctcccaggggtctctataataaaagatcgaggtggctactttcaggaggtcctctaatgtactatctggtcccaagtcccatttctgcaacctcctcctgatgtcaggagctgcctgagtaataattttatcctttaggattatctgtccctcgattgaattaggagatagagaggtgtgatttaccaaggcctctcttagcctctccaggaaggcagtgggattttcatcaaatccctggttaattatggacaacttagtataattgagaggcttggtcttagacctacgtaagccctctattatgcacacctgaaagtgtctcctcttccagtcttccatctcattattgggatcccatttagggtccttcactggtgctacttctcttccagttggataatattcgctcccttccctgatgctataggtgatgcaaagctcatccccaaatctctctgctgctggcagagcagcctgcttctcagtgtctatcaggttctgactcaaaagtaacataacgtctctccaggagagttcaaatgttagggtgaaattctggaaagcttctatatatctatcagggtcatctgaacacttgcccagatctcccttaatttgctttaagtcttgtagggaaaagaggacttggaccttactgggcccaaattcactgggcatctgtaggaggggcaagagtgagactgggcttgtttgggatgaagatttctaggaggggccaggtgagaggctgaagctggatacggaggttggggtggacccagaggagcagggcttgagggagctggcacgtcagctgggggtgcgtctgggactcgtgtctttaattccctgggcttgaccctggcagccttccccgagacagcaaacaggagggctggaacaatcctacatgtcagcaaaggtctggattgctttgcaaggtatagaaagcctgcacatttggggcctcagaccatgtgtcctcacatccagagaaaagttctaattgcaggatggtattgaaatgaatggtcccttcctgaagccaagccagtccttcctgtaaaccataatttggccaaacctatgtgcggagggctatgagatgcttttcctctggattctgagggtcaaaacagtcccaatggttcaggatacactcaaggggagtacaagctgggggtggtgaggagaactggctgcccattctgaaagacagggaatagaggtgttcctcatttcccttccttcttttggcaaaaagctcagggtgtgatggggagggaaagcaagcatcttcacttcactttccacctcttacccctgcgccctggcaaccttggcaggtgccggccacaggtacaaatgcggtatgtacccatgaagcagggagaacctggagattaggaattaactgccctcacctatgtttccttttctccctgctgttgaaaaactttgagttccctgggcctttttatcccatgaggcatggcctccttctgtgggatggggttcagtcagcaggaattggtcctgtccatttacattgtgcctgttgcctggctttgaattcctcagacctgctttctctttctagggcctcagcctgaagcttggaattgagtttgggactgaaaaagcatttcagaggctgtttatatccatttagtgcctcaaataagccctgctgaatttgcaattatcagccagcaggggtcactcctctgttaacttccctattagaaacagagcggtggggattctcacttagaaaagaaaaaaagagaaaaacagttaaagaggcaaaaagtggggaatgctgggggaagaaccccttgcttagtgcaagtgggcccctctaatccttataactttcccatccttcccccagttcagaccaggttgaattccttggccatggaaggaaaggttccattgatgcagtgggtgagaagcactctgtagggtcctggctaccatcggttttctcacacccccctcatcccaggcagtggagggagacacttctgcgacattgctccccctgccccttcatggctattgggtgtggcctttgcctgctgcaggcatgcctaggtgctggagctgggagggaaaagggtaaggagaggtgccctggaagccgctcatgcctggggctgtcaaggtggaggcatacatggcacctctaggaaaaattggtctgatttgcacctttggcggctgagccaaatgctcattttacttagtaacattgcctcagcctgtagcaaaactcttaacattataaaggaagagataagatccatttcaaataatgtgtgagagagaaaagagatgaaaggaaaacagagtcttttacctgcaggaaagggagagaagtggcagagttttggaagaaaggcaggcccaacagtttcccattcactcacactcaccttccgagatcccagacgagccaccagttgaaatgggaaaagtttccttgtccccctcacaggaggtggagtgggggtgtggcttgcttctttagtactccgctgctcaaacctctagggaagcatacagactggcaagttgtggggctacaaccccatggcagcatctaggggtagatgtttacagctgctgaagccccagtggacatgtggtaccatgtgctcttttagttttgccatctataggtggctttgtggtaaccagctcaattagacccattccttaacccaaagacagagggctttctgtatcccgcggttgttacctaggtgtaccagaaaaatcaaatcacacgtggtcttggagaatgagtgcaaggttttattgagtggaagtagctctcagcagatgggggagccaaaagggagaatagttttcccctgaagtcgggttattcagcggcccaggctctcctctggctgccccagccaaactctatgtcaatccattggtcggtggcctgccagagtgctggtgcctgttggtggattcctctcagcgtcgagagtttttccctctcaggaaagggagagaagtggcagccacccatgtgttcttgcactgatgtgctcctctcgacgtccaacctcctgtgtgtctgcctgctagggtcccagagtttttttaggcacaggatagggcatggtgggccagggtgatcttgggaaatgcaacatttggtcaggaaaacaaaaatgcctgtcctcatctaggtccaggggcacaagcccaggtttggagccctagccagggaccccggcctcctctacccatcactttccttcaccttttctgtatcattcaaagggaccatgcccttcccttcccagcacttctcttctgtatcaataggtgatgtttttaaaatttcccaactctagtgcaggcatggtactagacatatacatagaaataaaaccacacttattcttctggctggcaagacatagtatttttgccaaattatgtgttgttttgaagcattttatgtacccctggtcatataaaaataaagctattttgttcagtacaaacagcagcattttctggattagaaagttaatcatcttaaaagatcatcacggatttttccattgcactcatcactaattgctttggcaaaaaatttcttatctcacgcatgacaaaatcagccgcagtatctcctagtaatttaatggtgatgatctttataaaggaaataagcacatcaagggaaaacataattttttttaaaaaaagagtaataaaactttttaaaagtcttttttaaaagactgcttttctaaaatagtaaaataaaactccaccaataaaaccaccaacaaaacagaaaagaaaaaataatgatatgatcggagctatttgatgaaagatggtaaattaaatttaaaatgattagaagagaaaaagcaatacctgtctcccgtaggtctcagtccaggttctgctatgcctttctcctggtgagccacctatttaagagtcgcttaaagcatatgttaatccaacaacagcagattaaaaaccaatgcaatctgaactatttgatctaaaaacataaataaaatttaaaacaaataaaagagaaaaagcagtacctgtgtcctgtaggtctcagtccaagatctgctctgactcccttgtggtgagttagccctttagaagtcacttggggtggggcatatgttaattccactaacattggttctggccaatgagtcaggaaggtggtaaatggcaccttttcttcttgctgatttctttcagttcctttggagtctggacattagtcctttgtcagatgcctagtttgtgactactgtttcctatactgtgggttgtgtgtttaccctgctgatatttcttctgccttgcagaagattttcggtttcattaggtcctattgatcttattctatttttatatttttgcgtttgcttttggggcattagtcatgactacttggcctaagccaatgtctagaaaagctttttggatgctatcttgtagcatttttagactttcaggtcttagatggaagtttttatatgctttgttaaagatcaggtgactgaaagtaccgggctttgtttctcggttctctattctgttccattgctctatgtgcctatttttatacttcctgcaccatttattgaataaagtgtcctttccccaattagtgtttttgcatactttgttgaagattagttgtctgtaagcatttggctttatttctgggttctctattctgttccattgctctatgtgcctatttttatacttcctgcaccatttattgaataaagtatcctttccccaattaatgtttttgtgtactttgttgaagattagttgtctgtaagcatttggctttatttctgggttctctattctgttctattgctctatgtgcatattttataccagtatcatgctattttggtgattgtagccttgtagtataatttaaagcctgccttcagatttgttctttttgcaaagtattgctttggatatgcggtcacgtttttggttttgtataaattttaggattcttttttctagttctgggaaggagaatgatgatattttgatgagaattctactgctctgtagatggctttggagagtatggtcactttcacaatattgattctacctattcataagcttataatgtgttcccatttgtttgtgtcaactgtgatttctttcagcactattttgtagttttccttgtaggaaacttacattaacctacttggttaagtatatttctaagtattttacttattaaaaattctcagggaaatgcaaagtaaaactgaggtgggaaattaaagaaaaataaaattaaaaagaaagggaaataagctttcttgtattaagctaacttgtcccagaggcagcaacaggcacagcccagacccaggaaaagtcttgataatattatttattgtattctggagactcttccagcactccttcaatgtagggagaagaaaaacaaattttcctttgttttatggtatgagtttatagattcttgttctctttaactagtaacttcaagtattctgttttatctaagaagtatggcaaaggtcatgagaagcctgagcaggcctgaactacagctctctaggcaccatagtgaagataaaccaatgcaagcctctttagagcaaaacctagataatagacatctgggttgcatagcaacagttatgtgcaatcctgagttatgaacctgttacaatttgattaactgtctttttcctgcctctgtatccctgctttcacaccactgtaagcttgcttcaagctggcccacccccttttgtgaagtgtgtataaaagtcaagtgctgtctttgttccaggccctgtctttggacgtgagtctgctgggcctgagagcactcaataaaagattctcctgttttaacccaaagcctctctctcatcctcctaaatcccacaacaaaaccacaatgagatgctatcttaatcttgctagaagcccataatttaaaagtcagaaaacaatagatgttggcatagatgtggtcaaaagggagcactttgacactgctagtgggaatttaaactagtccgaccactatggtaaacagtatggggattccttaaagaactaaaagtagaccattcattccagcaatcccattactggctatctacccaaaggaaaagaagttattccataaaaaagacacaagaatatggatgtttatagcagccgattcgcaattgcagtgatatgggaccaacttaagtgcccatcaacgaacgagtggataaagcaaatgtggtacaccatggaataatacttgataataaaaaggaacaaaataatgtcctttgcaacaagttggatggaactggaagccattattctaagtgaagtaactgaggaatggcaaatcaaatattgaatgttttcacttttaaatgagagttaagctatgagaatgcaaaggcataagaatgatataatggacttggggactcagggggaaaggttgggagggggatgaggaataaatgatgacatattgggtatattatacactgctcaggagacagatgcctcaaaatctcagaaattaccactaaggaacttttatccacataaccaaaaaccacatatattccacacactattgaaagaaacataaacattattttaaaaaataaagccacttttaaaattagcaaaataaaataaatatgtcttcagagtttagatattggatccaaattagacagatcaaatactgcctttactaaatattttcatgtcattaacaacttctaaaacctttcaaacagttttttgacatgtcttggaaccatccatttctagctaaggcctgggcacctgtgaaatagggccatgcccccccttatactgggaagagtaagatatttcaagactaagatgttttctacagctccatctttttctttaagctctacatcaaggacataattaaaattggttgtctcctaagtggtttactaaaaatgcatacttaagagttaccattataattaatatttgtatctaaagctacttaaaaattttcacacacaaatctgactgaacaagtaaaatatattttaagtcaaagtttataaaaggacatgagaacatagcttttatgaaaaaattagttttgtcaagtttagaggttttcaaatattttaaattcaggaaataaaataacaaaaagacaaaagaaaatggttgaacaacttagaaaaggtttgttaaaattcatcttataaaacaatctacatgtaaaaagtgggctaaaatttgaaagagattatttaggttttccataaattaatccagaaggggtaggaagtcttaagaatgaggaaggacaggaggaaggggaggtcatcctgacactgcagaggcagaagtgcagctgaaggtatgaaggctaagaggggaggggagtttgagtgctgctgcctggctgtcagagcagaggagggtcctgggcaccagacttgaggaagggatgaaaatgctgggcagacctgtagtgggcccttgagatggcagatagtggtttccagagagagggccattgttttccagtgcccagcactgagcagagagagttttgggcagtgtaaaaaaaaaaagagaacttacctctttctcgttttagaaaaagaacagtctaagaatatcagcagggaaactctcagtgcttcaaggggttaaacgcccttttggctttcttgtgttggtttcatcatagaggaggagaaacttcttggaagtgttcctaaaaacacaacacgtctgcttctcctttcaaaaaaggaagtgctaaaacacgaacactctagatccaaatattaatacggatgtctaaatgcttccgttttccaaggggcagaaagctaaaggttgtaacctattcatttcagtcaaagttggtgaaagggaagcaaaggaactgggtggggcttggaaggatgacgaagctcaagctcattggccagcaacctctctcctgggggcgggaggggtgagcatacgtcattgctttggcttctataaaatgaggaggactcaccgagtgtgaagagtccttctggtgattgcagctgagagcacactcacgacgttctgcaaggattctctgattatgattctgaagggaaaagcgatggaatggacagcagagattgtaattttctttatcttgaattacggaagaaagtatctaggacagaaatccacgacaagtccttggaaccagcagatctcttcgttcacggagacgttgacgtattctctattgaagaagattcttaccttcttactggacaaggttttgtcagttctgcgtgactggattgtccgggagactctgaggaaactgatgtcacatgtttttccaaagaagatgtttctggaaccaacaactgtgattgtggtttgaggacttctgagagttccagtacaggaaataagcagaacatcagctggaggctaaacggatccagacttcactcttcacttcccttcctattcagtctattgtgcctgctgactgagaagcttggctggtatgtgagcaaataaacggaactattcagaaggagatgttgacatattctgtattgaagaagatccttatcttctcacctgacaaggttttgtcagttctgtgtgactggattgtccggaagactctgaggaaactgatgtcacatgtttttccaaagaagatgtttctggaaccaacaactgtgattgtggtttgaggacgcctgggagttccggtatgcgaaataagcagaacatcagctggcggctgaagggatgcagcctccactcttcacttcccttgccattccatctattgtgtctgcctgactgagaagcttggctggtatgtgaggaaataaacggaattataaacaaggagattgtttctcatctacttcattctgttgtggcttttctattttggggttcagggtgtgtgacaaggaccaaggagatgaaaggtttcatgatggagaaagcccaggcaatcagattgaagagctatccacagggaatcttggctgctgaggggctgcaccctgcaacggactgaccatatgacagaaaagggttttaaaggctcaacttctggactgagaacccagagtaatttgggaacctcctctgtgaggagatatgaaagctgggaatcatgacatccctaggaatggaaggcacatttcctgatggaaggggtgctttggaaaacaggagcagagtagacacagcagccttgtggatacgggtgggcagcatgcatgggtgatgtgaacgtggagtgtttgtgatcgaaactcaaaatgtctgacaaagtgaaaacctagaaaccacaatgaggaggaagagtttgtgagggcaatcactctccccatgtgtgaaaatcgggggctcttaaaatctcatctggagaggtgcagtctaccaaactctgggactttagcctccccttttaaaaaaccgtgcatcaataccaacgtccgaaaccacagaaataacacctggcttgcatggagacaaggacaaaaagccgtcatgatgagttgttctgctcacttgctgcctctgttcagtgcacaggatattgtccacccactagcaggctactgcaagagaagtgtgcaatatgttccctatgtgccatatatgtgccatatggcccatatgacaactgagtcagaaaatatctgatgccctcagagttacactccacctggagcttgcccccagccatccaggacctaggctccctaccctgtccaattttctggtgttttgggggcttcattctctaaggtgtgcccactctttactcaaaccaaaacacccacatattcctgcccatgaacaaccaatcaaccacttctcagttccacatcctgctgttgggtctctagtggtgacactgtaactcccaggtcatagtggtgacactataacacctagctaaattgatgccttgtctctaggaggccatgggctcctgcaggtctcatctgactctctgtagccttccctgacaatgctcacaatacccaagccagagccacattgacagcaagctgctctcatcttacctttgccagacctggccactggaaaaggctgaccctcatcctgcaatgcctatacctccaacctttgtctcaagctggtgtcctggagggacttctaagcagaaaacagattcagactcccatcctctcctgaatggcctcatatccaattctcagaccctcagccttcattgtaaggacacttcatccatgcccttgagtattctgtctgcactgtgtattctgcaatagattctcctccctctgcgaccctcaactccttccgcagactttttgttttcttgatcatctaccatagtcttccactgggacactgccaagcccattctggagagtgagttgtgcaagtacactgccccccatctacctttcgggaggtgtatacacccttctttctcccaggtctggaggctttctattttcatcctgaggcatctccacctgctcttggattcttcaaattgacaaccaccagttaacaagaactatgtgtcaccaaatagccaaacaatggcaattacaaaaataaaattaatagctgtaacccccattagcaaggatacacaaatcaaatcagggatagtgggtgaggaagtctgcctaacattcaaggaaggattctgaagtgatacaaaatcattgcctttgctatctttagaatggacactttcagccaggcacagttgctcagcctgtaatcccagcactctgagagccccagttgggtggatcacttgaggccagcagcttgagaccaccctgggcaatgtgcagaaaccccaactctactaaaaatacaaaaatagccagttattgtggcacatgcctgtaatcccaactccttgggaggctgaggcacaagaatcacttgaatctgggagccagagtttgtaatgagcgaagatcatgccactgcactctagcctaggcattagagtgataatctgtctgtggaaaataaaaacattcctcttcaaagttttcttctttaaatcataaatgttggaattaatatatcctctttgaaactcactttcttcaagcttctttatttgatggtagtaaatctttgttaagctttatgaggcaagagtaatggaagaagcatattatatatatttatactctaacctcagtgcttgttctagcaagctcaggcatgcgtgaatgtgcccaggcatgttccagcccataccttatatcctttccttattgggaaatgctgttactcctataagcattcttgtaagcaacttcctctttttctttgtctccactatctttacctattgaggacagttttaggttcttagccagttggatgtagcatagactgtgaggtccaaccccagccaatggagatagcacacagcagtagcgacctcatgcttaacagataaatattcctgtctccctttgtttggggtgctctcagctgatgagcaacaccctttctaaagaaattaaagttgtcttgctgagaaaacttttggtctaaatgctgattcttccttgcagcactgaagaagaagcaattatttccaacactttctcatacacaaaaaaagaagaaggtggaagaaaactttcttgtgcaccctatccctcactcagaaagacaacagaaggctcctagtggcaagccctagaggattcatttcttttgggaaccctcttggctgggatactaggactcaggtcaaactcagcattttcagtgtgtgggaagtgtgcttgggtttcactgttacttccaataatgtgatttggtccttggggttcaccaaattttggtatggagtggtgaaccctgttaagtttaagtgtctataaaattaacaaagcaaaataaccattctgccccatggttcagagaccaaatattgtgtaggaaatgctttagcgagagaaacagagaagaataaaaaatgtcctcaagcgctgcattatttcttgttatcgtccagatcttagaggaaaggctttcattttccctcattcagtatgatattagctgtgcatctgtcatttatggcttttattatgttggggtatgttccctgtgtatgtagttttttcagggtttttgttatgaagtgatgttgaactttatcaaacgtttttcagtttcagttgaaacgatcatatgctttttgtccttcattctcttgatatgatgcatcatgttgatgatttccatatggtgcactgtccttgcatcctgggcatgaattccacttgatcatgacaaatgaatttttaatgcattcttgaattccgtttgctggtattttgttgaggatttttgcatcaatattcatcagagatattggcctgcagtttctttttttttcttttttctttgttttgttgtttgtttgtttgtttgttttgatgtgtctatgtctggttttggtatctgggtagtagtgttccatccccttttattttttagaataatttgaataagactggtgttggttctttaaatatttggtagaattccgaagtgaagtcattgggccccgggcttttctttagtggaaggctgtttattatggcttcaatctcgttacttattattggtctattcatgttttgaatttgttccttatttaatcttggtaggctgtgtgtatctaggaatttgtccatttcttttagattttcaaatttattggcacataattgcccattgtagcctctaatcgtcatttgagttcctgcagtaccaattataatgtctccttcttcatttttgattgtatttatttggatcctgcccctttttttcttacttaggctgcctaataatttcttaattttgttgaactttttcttttgtttgtctcgctctgccaccaggctggagtgtagtggtgtgatcttggctcactggaacctccgtctcccaggttcaagcaattctcctgcctcaccctcccaaatagctgggactacaggcaagtgccaccactcccagctaatttttgtatttttagtagacacgggttttcaccatgttggccaggatggtctcgatctcttgacttcataatccacctgcctcagcctcccaaagtgctgggattacaggcatgagccactgcgcccagcctaattttgtttaaattttcaagaaatcaacttcttctttcattgatttctgtattttttatttccattttatttatttaaactctaagctttattctatcttcttctcattttagctttggtatgcttattgcctctctagctctttaatgtgcattgttagattgtttatttgaagttcttcctctctacaccataagacgtaagcatgtcctcattatgtcataagatgtaaccacttacagctataaacttccttcttagttctgcttttgctgtatctcataggctttgttatgttgtgtttccattatcaattgtgtcagaaatttttcaatatttttcttaatttcttcattgagcaactgatcatttgggagcatatttttaaacttccatgtacttacatagtttccaaaatacctcttgtgatcaatttctagttttattccactatggttcaagaagatgcttgatattatttcaattttttttcacattttaagatgtgttttgtgacctaacatatggtctactttttttttttattaaactttaagttgtggggtacatgtgtagaccgtgcagttttgttacataggtatacacgtgccatggtggtttgctgctcccattaacctgtcatctacattaggtacttctcataatgctatccctcccctaacctccaccctctgacaggacctggtgtgtgatgttcccctccctgtgtccatgtgatctatttttgagaatgatccatgtggattagaatgctgtggaaaagactttggattcctaatatccagggagggagacgatgatattactttcaatatcacacgggtgtacacactctctgtgacattgttcctaatatccagtggaagagaggatgatataacacccagggagggagaggatgatattactcttaatattgcagggtgtgtacccatgcctatgatattgttcctaatatcaggagggggagaggatgatattactcagaatatggcagggggtgtacacacactctgtgacatggttcttaatatacaggggagaatgggacaatattactctcaatatcgcagggggcgtacaaccctgtgatttgttcctaatatacaaaaggggacagtatgatattgttcctaaaatcgcagaaggtgtacaacgccctgtgatattgttcctaatatccagggcgggagaggatgatattacccccaatatcacagggggtgtgcactttccctgttacattgttcctatgatccgagtggggggaaatgacattagtcccaatatcgcaggatgtgtacactactcccccatgatattgttcctaatatcaagggggagagaggaggatattactcccaatatcgcaagggaggtacatcctccatgcaatattgttcgtaatattcaggaggagagaggaagatattactctcaatatcgcagaaagtggacacccaccctgtgatgttcttcataatatccagggaagcagacgattatatgactttcaatatcgctgggagtgtacatcccttttgggatattgtttctaatatccaggaagggagaggattatattacttccagtattgcagccagtgtacacatttcttgtgatattgttcctaatatccagaaagggaaaggatgatattactcccaatattgcaggtggtgtacacccccctctgatattgttccttacatcaaggaaaagaaagaagaatattactcccaatatcgaagagagtgtacacccctcctgtgatattgtatttaatatccatggggaaagaggatgttgttactcccaatatcgcagggggtttacacccacactgtgatattgttcctaaaatccagtgaaggagaaaataatattgctcccaatattgcagggtgtatacaggccctcccccgttatattgctcctaatatccagcggtggagaggatattactttcaatttttgcagggagtgtgtaccccctctctgatatttttctaatatcaaggatgggaaaggatgccattactcccaatatcgcaggaggtgtacatgccctgtgatattgttcctaatatccagggaggtagaggatgatattactttcaatattgcaggggctgtacaccctctatgatgttgttattaatatttaggttgggagaaaatgatatttttcctaatatcctgggaaggaaaggatgatattactgtaaatattccagggagtgtacaccttcctaatattctaatattgttcctaatatccaggggtgggagaggattatattactcccaatatcgcagtgggtgtacacccctcctgtgatgttgtttctaatatccaagcgaggagaaaatgatatcactctcaataccgcagggggtgtacaccttccccatcatatcgttcctaatattcagagggaaagaagatgatgttactttcaatatcgcaggggttgtacacaacccctgtgatatttctcctaatatccaggaagaaagaggatgatattgctcccattatagcagacggtatacgcctccctgtaacattgtttctaatatcaagactgggagaggatgatatcacttccagtatcgcaaggggtgtacacctcccccgtgatattgttactaatatccagggggaagaggataatattactttcaatattgcaggggctgtacacccccgtgatattgttgttaatatttaggttgggagaaaatgatattagtccaaatatcgcagagagtgtacacacttccgataatattgttcttaatatccatgggggagacgatgatattacacccaatatcgcagggggtgtagtctccccttgtgatattgtccctaatattcagggaagtaaacgatgatgttagtgtgaatattccagggagtgtacaccccctttgtgatattgtcctaatatccgcaggagagaagataatattactcccaatatcgcagggggtgaacacaccccctgtgatattgtttctaatatccaagcgaggagaaaataatattactcccaatgtctcaggggatatacaccttccctatgatattgtttctaatattcaggtggaaaacgggtgatattactcctaatatccaggaagaaaggggattatgttactccccttatagcagggggtatacacctcccctgtaatattgttcctaatatcaaggctgggatatacgtggggggaaggatgatattactcccaatatcacaggggttataaaaccttctgtgatattgctcctaataaccatggcggaagaagatgatattactcctaatattgcaggaggtgtacactcccccattatgttgttcctagtatgcagaaaaggagaggatgacattattgccaatatcgcagggtgtgtacaccacccatgatattgttcctaatatttagagggacagaggatgatattactcccaatatcgcagggggtgtacacgcatcccctgtgatattgttcttgaaatcgaggggaaagagaattatatttctctaaatattgcagagggtgtacaccgccccctgtgatattgttcctaatagccgggggcggggggagataattaaattactttcaatatctcagagagtgtacatcccccttgtgacattgttcctaatatccagagcaaaagagaatgatattcctcccagtatcgcaggaagtgtacatttaacctgtaatattgtttctaatatccagggggaagagaatagtaatactcccaatatcgtaggggttgtacaccttttctgtgatattgttgcaaatatttagaagagagagagaatattactcgcaatatcacagggaatgtatacttcccctgtgatattgttctaatatctagaaaaagagaggataatattactcctaatattgcagggggtgtacacccccacttgtgatattgttcctaatataaaggaaggtcgaaaaacaaacggggagcccagggggaaggaaggcaggcgaggaagaggcagcgccggggcgccggagggagcagccgggccgcggaagcgcgagcacgagaccggtcgcggtcgcagtcgcatttttgccgttgtcgcggccgccgccgccgaggcttacccggggatgtctgagcccgcgcctcgcggcccccaagctccacgctgcgcccgctgtcccggcctctaagggccgccacgtccctgcggcgcgcgcaggcagaaagcggcttcgtgccggcggagggggcccgggcgggccgggaaaggctgccccaggccccgcgcctaccccatcaccgcggccggcgccgggccgggaggatgagcggtgtggggctctgaagcatggagggggttttgtacaagtggaccaactatctcacaggttggcagcctcgttggtttgttttagataatggaatcttatcctattatgattcacaagatgatgtttgcaaagggagcaaaggaagcataaagatggcagtttgtgaaattaaaggtgacagctttggaggggaccacccttgattggatacataaattctgttcattcagcagacaacacaagaatggaattaatcattcctggagagcagcatttctacatgaaggcagtgaacgcagctgaaagacagaggtggctggtcgctctggggagctccaaagcatgtttgactgatacaaggactaaaaacgaaaaagaaagaagtgaaaccagtgaatcgctgaaaaccaaaatgtctgaacttcgcctctactgtgacctcttaatgcagcaagttcatacgatacaggaatttgttcaccacgatgagaatcattcatctcctagtgcagagaacatcaatgaagcctcttctctgcttagtgccacgtgtaacacgttcatcacaacgcttgaggaatgtgtgaagatagccaatgccaggtttaaacctgagatgtttcaacggcaccatccggatcccttagtttctcctgtgtcaccttctcctgttcaaatgaggaagcgttctgtcagccaccctggttcttgcaccagggaggagtagccactgtataaaagaaccagtatctgcacttcaccgactctcccagcgacgccgaagaacctactcagatacagattcttgtagtgatattcctcttgaagacccagatagacctgttcactgttcaaaaaatacacttaatggagatttggcatcagcaaccattcctgaagaaagcagacttatggccaaaaaacaatctgaatcagaagatactcttccatccttctcttcctgaagaaactgtagtgtccaactttctctaagtattgctatgcaaaagctgctgtaattgaactattgttatagggagtagttttttcccttaggactctgcactttatagaatattgtaaaacagacaaacaagaaaacaaaccacatacttttgaagcgtgttttatctttatatagtttgtttgcaagagtattttcctaataacttcacagtatgaatgtgcatcttttttttctttttttaacaaatgatggtgtaacattttgacatccataaggacaaatgtagatatttttctaaaaaaccgtgaggggactgacagcttggtcagggtgtattgtagcttataaacatgaaatcttacaaggtttcagtttgacagaagtgtgatatatgtaacttgtgccatggaccaaatggtcactttaccacagctaaaaatgagttatgatagcagcttgatggtgattgcattgtattcctttaatcaaaaaggaaacgcaatattctaagtatctttagcccaaataccatgacatattgagcatctttaaataaccagactgtattgtccttcatatgtgaagttgacactactgatttgtcaataccaaattttgggttaaagtgtttaatttttatttatttattttcttgttgcctcaaaagatgattgcattctaacttttgtgacctaccaaatttaagatgtgtatacattgttctttacgttgttctagaaaagagattttaatgctgtagtgacttagctcacttacatcagagaaataaacaactttcaatggaaaaaaatatatataaaggaaggaagaggatgatattacttctcatatagaaggggttgtacaccccccttgtgatattgttcctaatattcagggagggagaggattatattactcccaatatagcagggagtgtacacccccccccccgtgataatgttcctaatattcagggaagcagaggatgatattactttcaatatcacagggggtgtgctgtccccctgttatattgttcttaatattcaggggggagaggatattattatgcccgatatcacaggagaagtacaccccacaagtgatattgttcctaatatccaggggtaaagaggatgatatcgcaggtggtgtacacccctccccgtgatattgtttctaatataaagaaggagagagcatgatattactcccaatatcgctggaggtctacaccccccttgtgatactgttcctaatatccaggaagggaaacaatgatattgctgtgaatattccagggggtgtacacccctttgtaatattgttcctcatatccagggggtagagaggatgatattactcccaatatcgcagggggtgcacggccccactgtgatattgtttttcatatccaggaggggagaggatgacattactctcaatatggcagggggcgaacaccccctgtgatattgtgctagttaggttgggagaaaatgatattactcccaatatcgcagggggtgtacaccgctcctgtgatattgttcctaatatccatgacgggagaggatattactcccaatatcgcagggggtgtacctctcccctgtgggattgttcacagtatccaaaagggaagaggatgatgttactcccaatatcacagggagtgtacaccaccattgtgatattgttcctaatagccagggaagaaaacgatgatattattgtgaatattacagggggtgtacacaccccctgtgatatggtttttaatatacaggttggaaaaggatgatattactcccaatatcacaaaaggtgtacacacccccccatgatattgttcttaatacttcggtggggagaaaatgatattagtctccatatcacaggggtgtgaactcctccggtgatattgtttttaatatcaagaggggaggagatgatattgctttcaatatcgctgggggtgtacatccctcctgtgatattgttccttatatccaggcgaggggaaaataatattactcccaatagtacacaccccatgtggtattgttcctaatactcagggggaaagaagataatattactttcaatatcacagggtttgtacacctttcctgtggtatagttttcaatatccagggggaaggtacatgatattactcccattgcagcaaggggtgtacacacctcctgtgatattgttcctaatatccagaagtggtgaggatgatattactcccagggggtgtacaccccacctatgatattgtttctaatatccaggggaaaagagtgtgatattatgcccaatatcgcagagggtgtacacttatcctgggatattgtttctagtatttggggagggaggagaggatgctattattctcaatatcgcagaaattgtacacccccgctgtgatattcttcataataatcagggaaaaagaggatgatattactaccaatattgcagggggttacacttcccctttggtagtgttcctaatatccaggaagaaagaggatgatattaatcccattttccaggaagtgtacacccaccgtgtcatgttgttcctaatatccagcagggaagaggatgatattactcccaatatcggagagggtgtacacttcccctgttatattgtttctaatacccagggggaagaaggatgacattactgccaatatcacagggtgtgtaccccaccctgctattgttcctaatattcaaaaggaaagatgaaaatattactcccaatatctcagggtgtgtacacctctcctgtgatatcgttcctaatatccacaggaagagagaatattactctcaatattgcaggggggtgtacacccccctgtgatattgttccaaatattcgggcggggagaggatgatattagtcccaatatcgcagggggtgtgcaccaacctgtgatattgttcctaatatccatgcgggggaggacgatatcactctcaatgtcgcaggaagtgtacacctctcttgttatatttttcttaatatccaggagggaaaagatgatattactgccaatatcgcagggtgtgtccaccccccttttatattgttcctaatatccaatggaaaagaggatgacattgctctccatatcccagaaggtgtacaacgcccctgtaatattgttcctaatattttgggggaagagaggatgatataacttataatatcacaggaggtgtacaccacccctatgtattgttcctaatatcctttaagggagaggatgatattactcccaatatctcaggtggtgcctattccccctgtgatattgtttttaatatccaggggaagagagtatgatattacgcccaatatcgcagggggcatacaccctctctgagatattgttcataatatatagagggagagaggatgatattacttccaatatcagaggtggggtacaccccccggttatattattcttgatatccaggaggggagaggttgatattactggatatatagcagggagtgttcacatcttctgtgatactgttcctaatatccagaaaagtagaggatgatattactcccaatatcgcagaacgtgtacacctccctgtgatattgatcctaacattcaaaggggagaggatgatattactcaaaacatcacagggcatgtacactcccctgtgatattgttcctagtatccagaagggagcaagataatattactttcaatatcgcagggggtgtacacccctctttggtatgtttcctaatatccagaaggaaagagggtgctattactttccatattgcaaggggtgtacacccccctgtggtatggttcataatatccagggagggaaagggtgctattattccccatatcgcgaggcatgtacaccctgctgcggtacggttcctaatatccagggggaaagaggatgctattacttcccatatcgcggggtgtgtacacccccgtgtggtatgttttgtaatctccgggaacgaagagggtgttattacccctcatatcgctggaaatgtacactcccctgtggtacggttcacaatatccaggggattgagggtgctattactccccatatcgcggggggagtgcacctccctgtggtatggttcgaaatatccagggtaagagagggtgctattattccccattttgcaggaggcgtacacccctctatggtatgttttgtaatatcccaggtaaggggtgctattgagagaagagagcaaaagaccccccccatattgttctgtattattttatactcagtacctgttttaagaagaaacaaggaagcgaaaccaaaggcaggcagcccggcgccaggcaccagatccaaaaccagacccgaaaccaggcctgggccttcctgaccttagcctgaaagttaaaattcaacccatgacctagcaactgatgttatccatagattccagacattgtatggaaggacattgtgaaatttcttgttctgttctgtttcactctgagtactggtgcatgcagcccttgtcacatacccactagattgctcaatcaatcatggccctttcatgtaaaaaccttagtgttgtgagcccttaaaaaggacagaaattgtgcactcaacaagcttggattttgatactctagtctgctgatgcttccagctgattaaaagccacttccttcactacctcggtgtctgtgggattttgtccgcggctcctcctgctacactgtgactccccttatagagaggggtgtacacccccctttggttcctaatatccagcgggggagtaggtgctattactccccatattgcggggagtgtacacccccttgtagtacggatcgtaaaatcaaggagggagagaaggtgtaattatccccatatcacagggagtgtacacccctttgtggtatagtttgtaatatccacgacgggagagaatgctattactccccatatcgtggagggtgtacaccgccctgtagtatggttcgtaatatccggaaggggagaggttgctattactccccatatggtgggaagtgtacacccccatgtgatatggttcataatatccaggggggtagaggatgatattacccacaatatcatagaaggtgcacacccttttgtgatattgtccataaaatccagaaggggagaggatgatattacttccaatatcacagggggtgtgtagccccatatgatattgtttgtaatatcaaggtagggagaggatgctattccttacaatagctcaaggggtgtaaccttcttgtgatattgtttgtaatatccagaaggggagaagataatttttttattttaaaagtaaactttaatgtcaaaaatgcaaacttgagaagggcagaaagatcaaacagaaggctgccacttcacaattggagggttgcacagtggccgggcagaggcgctcctcactccccagacggtgaggcagccgggcagaggtgctcctcacttccgagatgttgcaggagccgggcagaggtgctcctcacttcccagaacagggggctgccgggcagaggtgctcctcactgcccagacggtttgcaggcctggcagaggcactcctcacttcccaaacggagcagcggcaagccagaggcgctccacacttcccagatggtggggcagccgggcagaggcgatcctcacttctcagagggtagggcggcccagcagaggcgctcctcacttcccacatggtggggcggcaggctagaggcgatcctcacttcccagacggtggtgtggccatgcagaggtgctcctcacttcccagatggtgtggccgccgagctgaggcactcctcacttccctgacagtggggcggctgggcagaggcgctcctcacttcccagacacttggactccgggcagagactctcctcatttcccagatggtggggctgccgggcagaggcgctcctcacttcccagacggttcagaggccgggcagaggcgctctggggagaggataatgttactcccaatatcgcagggggtgcacactccctgtgatattgttccgaatatccagagggggaaaggatgatatagctcccaaaatcgtggggagtgtacacccccctgtgatcttgtttgtaataccaagaagaaaagagaatgctattatttccaatatagcagggggagtacaaccccctgtgatattgttcgtaatatctagggggagagaaaattatattagtcttaatatctcaggggacgttcatccccctgtaatattgttggtaatattcagaatggagaagatgatattgttcttaaaatacaggaaaaaatatgataatattacttccaatatcgaagggggtgtacactctcctgtgatattgttcccaatatccagaatgaaagaggatgctattactcccaatatcccagggagtgtacacccctttgccatattgttcataatatccaggggaagacaggataacattactcccaatatcaccgggggtgtccacccactagtgatatttattgttcatcatatccagaaaaggagaggatgatattactcccaatattgcaggtggtgtacggtccctgtgatattctttgaaatatctagaaaaggagaggatgatatcactccgagtatcacagggggtgtacacccccctgtgatattgttcgtaatatccaggggagaaaaggatgatataattgccaatatttcaggggatgtgcacctccctgtgatattgtttgtaatatccaggggtggagaggatgatattactcaaaataacgtaaacatcctgtgtgtacatcccctgtgatattgtttataatatccaggggggtagaagatgacattacccccaatatcacagagtgtacacacccctgggatactgttcataatatccaggcgggaaagaatgaactacttccaatatcgcaggatatgtacacccccctgtgatatatttcctaatatttatgtgggtaaggatattacccccaatatcacagaaggtgtacatcctctttgtgatattattcctaacatccaggaaaggagagaatgatattactcccagtatcgcagggggtgtacaccacccctgtgatattgttgctaatatccagggggagaggataatattactcccaaaatcacaggggacgtacactcctcctgagatattgttcctaatattcatggggaaaagaatgctactactccaaatacagcagagggtgtacaccatccccgtgatattgttttttatatccaaagggtgaaaggctgatattactcccaatatcgcagggggtgtacaggccccccatgatatcattcttaatatccagggaggcaaagaatgatgttactcccaatattgcaggctgtatacaccccccgtgatattgttcctaatatccagagtaagagaggatgacattgctcccaatattgcaggggttgcacgcacgccctgtgataatattactcccaatatcaacagtgggtgtacactcctcctgtgatattgtttgttatatctaagaaagaagaggatgatattactgtcaatatcacagaaggtgtacagccccttgtgatgttgtttctaatatccagcggtgagaggatggtattactcgcaatattgtagggggtgtccaacggccctgtgatattgtttctcatattcaaaaaggaaaagaataatataactccaaatatcgcagggtgtgtacacttccctgtgatattgatcctaatatccaggaagagagaggatgatattaatcccaatatcacagggggtgtacatcgcttctgtgatattcttcctaatatccagggggggaggggatgctattactcttaaaatcgcagggaacttacactcccactatgatatttttcctaatatccaggaagggagaaaatgatattactcctaatatcacatatcacaatgggtgtacatctccccgtgatattgtttctaatatcaaggatgggagaaaattatattactctcaatatcgcagggggtgtgcacacctcctgtgatattgttcctagtatccagcggaggagatgatattactttaaatattgtagaaggtgtacaacccccctttgatattgttcctaatatccagggggaaaggagatgatattactcctaatatcgcaggggctgtacaaccctatgtgatattgtttcttctaatatccaggggtggagaagataatattactcctaaaatcgaaggggacatacactccccctgtgatatttttcctaatatccagaaggaaagaggatgatattactcctaatattacaagaaatgtatacctgtcctgtgatattgttcctaatatccagaggggtaaatgattatattactcccaatatcgcaggggtgtacaccttccctgagatattgtttctaatatgcagtggaggagaggatggtattactcccaacatcacaggagatgtaaactccccttgtgatattcttcctaatgttcaggacgaaggagggtaatattactcactgtattgcagcagggggtgtagagccccctgtgatattgtttttaatattcaaggttggagaaaataatattccttccaatatcgcatggggtgtacacccttctttttatatagtttctaatatctggggggagaggatgatattactcccaatatcgcagggggattacacccccactgtgatattgtttttaatatccagggtgggagaggataatattactccaaatatcccagggctatacaccctccgtgtgatattgtttctaatatccagaggaagagaagatgatattactcccaatgtcacagggtgtgtacaggccttctttgatattgttcttaatatccatgagggagaggatgatattactcccaatatcgcaaagactgtacaccctttctgtgatattgcttccaatatccagggagggagaggatattacactcaggatcacagggggtgtacaccccaacctgtgatattgtttctaatatctagggaaaatgagggtgatattactatcaatatcacaggaggtgtacactcccttatgatattgttcctaatatccaggagaatgacaggataatattactcccaatatcgcgggtggtgtctccccccactccgtgatattgttcctaatacccagagggggagagaatcatattactcccaatatcgcaggggatgtacacctacatccggcggagtagaagataatattactcacaatatcgcaagaagtgttcaccttccctgttatattgttgctaatatccagggagtgagaagatgatattactttcaatactgagcgtgtacactacccctgtgatattgtttctcatatccagtagaggagaaaatcatgttactcccaatattgcaggggtgaacacctcctttgtgatatttttcctaatatcaggaaagggagagtatgatattacccttaatattgacaggggtgtacacccccctttgatattgttccaatatccaggggggcagaggataatattattcccaatatcgcagagggtgtacaccccccgtgatattgttcctaatatccagagaaataaaaaatagtattatttccaatatcacagggcgtacattttccctgtaattttgttcctaatatctggggggtggggtggcaggataatattactctcaatattggagagggtgtacacccccctgtgatattgttcctaatattcagggtgggagagaatgatgttactcccaatatctcaggagtcgtatacacccccttgtgatattttttctaatatccaggaggcagaggatgatattgctcccaatatcgcagggggtatacacccgagctgtgatattgtttctaatatgcaatatgggggaaggatgattttactttcaatatcgcagggaatgtacactttccttgtgattttgttcctaatatccaggggtggagaagatgctattactatattactcctcatatcgcaggcggtgtacaactccctgtgatatggttcagaatatccagagtgaaaaaggagggtgacattactcccaatatcgggggggtgtacacccctttgtgatgtggttggtaatatccaggggggcagatgagggtgatatcactccccatatcgtggaaggcgtccacttttttgtgatgtggttctttatatcccgaggggagaaggtgatattactccccatatcgcgaagggcatacacccccctgtgatatagctcataatattccggagagtggaggaagatactatgccctatatcgcgggtggcctacaaccccctatggtttggcttataatatccaggggggagagggtaatattgctccccatattgtggagacgtacagccccctgtgatatggtttgtaatatctttggggggcgagggtgatattactccccatatcgcggggagcatacacccccgtgatctggttcatagtatctcaaaggaagaagttgatgtgtacaacttaagggaaaaagttgaagtgaagtgtacacacgccctgtgacgtggttcataatatccaggcgggggagaggagagtgatatttactccccatatcgcgggtgttgtaaactcccctgtgatatagttcataatatccaggggagagaggagggtgatattgctcctcatatcgcgaagggtgtacaaccccctgtgatatggttcataatatccagaagggtagaggacgatgatattactccacatatcttgggaggtgtgatatggttcgtaatatccagcgatgagagaatgatattactccccatatcgcaaaaggtgtgatagggtttgtaatatcctgagggggagagggtgatattaatccctatattgcagaaggactacaccctcccatgacatggtttgtaatatcccagggggtagagtgtgatattactttccatatcacagggggtgtgatatgattcgtaatattcgaagggggagagggtgacactactctccatatcacggggtgtgtgatatggttcttaatatcccaggggttagaggttgatattaccccctttttggggggtgtgtacaccccctgtgatatggttcgtaatatcccgggggagacagggtgacattattccccatatcgaggggatcgtacaccccctgtggtgtggttcataatatccctagggggagatggtgatattactccccatatcagggggcgtgcactcttctgtggtataattagtaatatccagggggcagaggtcgatattcgtttccatatcatgaagggagtacacttccctgtgatatggttcctaatatccaggggggagagggtgatattattccccatattgcggggggacatacaacccctgtgatatggttcataataaccagaaaagaagagggtgatattaatccccgtattgcagagggcatacaccccccctgtgatatggtttgtaatatctaggggaggaaaaggtgatattactttccatattgctgggtgcagacacccctttatgatatggttcataatatccaagttggagagggtgatattacttcccatatcatgggaggtatacccttccctgtgatatggttcgtaatatccagaaggggagagattgatattactccccatattgtggggggcgtacaccttcctgtgatacggtttgtaatatctaggggatatagtgggtgatattactcaccatatcacgggggttgtaacatggtttgtaatatccaggggaggagagggtaatgttactccccatatctcggggcatgtacaccctcctgtgacatggttcgtaatatccaggtcgggagagggtgatattactcctcatattgccgggggtgtgttatggttcataatatcctggggaaggaggctgctatcactctccacatcttgggggatgtacactctcctgtgatatggttcataatatccagggtgggtgagggtaatattactccccatatcgcgggaagtgtacatacccctgtaatattgtttgtaatagaagagagggtgatattactccccacatcgcgggtggtgcccacccccctgtgatatggtttggaatatccagggggatgaggagggtgatattactccccatatctcggtgggagtacatccctctttgatcaagttcataatatccaaaaggaaacaggagagtgatattactccccatatcgccgggggtgtacacgggagggggagtacacccccggcgatatggtctgtaatatccagggaaggagaggagggtgatattactcaccatatcgcaggtggtctacatttacctgtgaaacagtttgtaatatccagggggggaaatgagaatgattttttttttttgagtctcactgtgtcacccaggttggagtgcagtggcacgatcttggctcactgcaacccccgcctcctggactcaagcaattctcctctcccagcctcctgaatagctgggactacaggcgcaccccacaacgtctggctaatttttgtatttttattagagacggggtttcaccatattggccaggctgatctcgaactcctgaccctgtgatccatccgcctcggcctccaaaagtgctgagattacagatgtgagccaccacgcatggcccaaggagaacgatattactccccatatcccagggggtgtatatccccctgtgatatggttcagaatatccggaaggaaagacagggatattacttcccatatcgcaaggggtgtgacatggttcgtaatatcccatgggggagagggtaatattactcttcgtattgtgaagggcatacactcccctgtgatacagttcataatattccggggagtagaggaagatattatgctccatatcgcgggtggcataagccccctgtggtttggttcataatatccagggaggagagggtaatattactccccatattgtggggacgtacaccctcctgtgatatggtttgtaatatcccagaggggagagagtgatattactccccatattgcagggacatacacccccctgtgatatggttcaaaatgtcttttttttttgaaggactggttctttatttcaaaaagacacttgtcaatattcattatcaaaacagttgcactattgatttctctttctcccaatcggccccaagtagaccacatcaaaggagagtacatattaagccaataagctgtaggatgtacacctaacagacctcctagaaaccttaccagaaaatggggacagggtagggaaagaaactttaaaagatcaacaaactgccagcccacggactgcaggggctgtcacagccagatggggtggccagggtgccacaaacccaaagaagcaaagtttcaaaataatataaaatttaaaaagttttgtacataagctattcaagatttctccagcactgactgatacaaagcacaatgagatggcacttgtagagacagcagcttcaaactcagaaaagggtaatgagatgagtttcacatggctaaatcagtggcaaaaacacaatcttctttctttctttctttctttcaaggaggcaagaaaagcaattaagtgctcacctcaacataaggggaacatgatccattctgtaagcagttgggagggggtagagatggaacaaaattttggtctcagaggtcttgccatcttaatttggtcacttctaatgaaaaaaataaaaaatagaaataacattatccaaaggtatcttaaagctgaaaacttgaacagcacattttttgttgttgttgtttggctaactcctcctggaaccacctttctggcttagctagtactttgtacagagcaatgaggcttcccatagtggagtctccctgggctctgtttggctctcagcaaggcaggcctataccttttcctctcctccatggagagaggaatatgcattaaggtgaaaaatcaccttccaaaagtgagaaagggattcgatcgctgcttcagggctgtggtattatatggaatgttttacaaaaggttgctacaaaacaacaaaagaggtaattacaaaatgtgtacatcacaacatactttttaaagacattatgcattgtgctcacattcccttaaatgttgtttccaaaggtgctcagcctctagcccagctggaatctccgggaagaggcggacagtttggtgaaaaagacacagggaaggagcgggcggcggaaggagggggcggcgaaaggagaaagcagccttccagttaaagatcagccctcaattaaaggtcagcttcgggcaggctggcctcaggcggagtctggttcagagggaggagcagcagcagggtgagactgaggcgttctacatctcattcaggtcaagcagagtctggtccagcatcctttgtgtacagaggtgctcccctttggtgcatttcagtttatcttccaagtcatcaattgtcttttccagcttggctaccgatctctcagcaaactcagcatgggtctccgcctcctttattttatcagtaagaatcttgatctcttcctcatatttgtcttctttttgagagtacttttcttcagcagcactcagacacttcaggttctggtccatcagtctaatctgctcatccatctctcggcaaagggattctgccagctcagctcgttcctctgtgcgttccaagtctccttcaatgatcaccaacttacgagccacctcttcatacttcctatctgcctcttctgcaatgtgcttagcttctctgagttggatttcctggagttccatcttttcttcatcttttaaggcccggttttcaataaccttcttacctctctcactctcatcagcagctttttccgcttcttccagcttttgcagggcagtagccaggtgctcctgagcacggtccagctcctcttcaaccagctggatcccacgttcaaggaggccacctcagcctcagcctgttcccgggcccacctttctccctcaacttctcgctggaggcgctcagctcgctcctctgcatcatctgcctgctgctgcagaacctggatcttgcgcttcaccgcctcgatggtggtgatcccagccatggtgcccacccagctactgctagagctccggttcctgcctcctccgatcggcgttgcagcctcctctcacccttacttccgcctcggttcaaaatatcttaagggaaggagttgatattactccccacatcacgggaagtttacatcccctggtgatatggtttgtaatatcccagggtggatagggtgatattactctccatatcgcgaaggagtactcccccctgtgatatggttcataatatccttggggggagagtgtgatattactccccatatcgcgagggccatatactcctttgtgacatggttcgaaatatcccggtgggggagggggtagagggtaatattactccccatacagcgaagagcatacgcccttctgtggcaaggttagtaatacttcagggaaaagagtgcaatattacttttcatattgcagggaacatacactcccctgtgacatggttcgtaatatcccgggggctgagagggtgatatttctccccatatcaccgggggcctacacctgggtgtgatatggctcataatatacagggagggagagggtgatattactccacataccgagtgaggggttacacaccctcgtgacatgttcgaaataccccaaggaggagacaatgatattactttccctgtcgcgggggctacaccctcccagtgatatggttcacaatatcccggggtggagagggtgatattactccctatatcaccggggggtgtacacttccctgggaaatggtttacagtatccccggggggagagggtactattactccccatatcacgttacatatcagggtacacccccacgtgatatggtttgtaacatcccaggaggaagaaaatgatattactccccatatcgcggtggcatacacccctccccgttaaatggttcataatatcttggggtggagagggtgatattactccccatatcacgtggggcatacaccccactatgatatggttcataatatcccggaggggagagggagatattactctccatgtcgcggggggcatatacacccctgtgatatggtttgtgatatcccgggggcggagagggagatattactctccatatcgtggggtcgtacacttttctgtgatatgattcgtaatatccagacggggagagggtgatattacttcccatattgcgggggcgtacacccctctgtgatatggttcataatatcccgaagaaaagagggtgatattactcctcatatcgcggggaacacacaccaccctgtgatatggtttgtaatattcagcgggggagagagtaatattactccctgtatctcggatggcgtacactcccctgtgatatggttcataatatccagaagaaaagagggtgatattactccccatattccagggaatgtacaccaccctttgaatatggttcgtaatatccaggaggggagagggtaatattgctcccaatatcgaaggaggtgttatacggttagtaatatccagagaaggagagggtgacattactccccacatcgtggtgggtgtgcacccacctgtgatatggttcataatattcaggttaagagaggtgatattgctttccatatcgccaagggtgtacactcccgtgaaatacagttcgtaatatccaaaaggggagagggtgatattactcccatatcgtggggggtgtacacccctctgtgatatggttcataatatccagggtggaataaggtggtattactccctgtatctcggggcatgtacatcgcctgtgatatgattcataatatccagaagaagagagggtgatattaatctccatattgctgggggtgtacaaccccctgttgtatggtttgttacactgagttggggagagggttacattactctcaatatcgagtggggcatacacacttatgtgatatggttcataatatcccagggaggagagggtgatattactccccatatcgcgggaggcatacaccccaatgtgatatggtttgtaatatctacatttttttttttgagacgaagtctcgctcttgtcccccaggctggagtatgatggccggatctcggctcactgcaacctcagcctcccgggttcaagcgattctcctgccttggtcccccaagaagttgggattacaggcgcacaccaccacgcccggctactttttgtatttttagtagagaaggggtttcaccatgttggccaggctggtctagaactcctgacctcagatgatccacctgcctcggcctcccaaagtgctgggattacaggcgtgagccactgcacctggcctggtttgtaatatctatgaagggggaaggtgatattactttccatatcacgggaggcgtacaccacgatgtgatatggtttgtaatatccagggggtatactgggtgatattactccccatatcgcggggagtgtatacccttttgtgatatggttcctaatattaagctgaggagaaggtaatattactccccatatcgcaggggtttttatatggttcataatattcaggaagagagagggtgacattactctccatatcacggggtgtgtactcccccatgtgatatggtttgtaatatccagggaaggagaggttaatattactccccatatcgcagggggtgtacacctctctgtggtttgtaatatccaaagggaagaggatgatattatcttcaatatcttggggggatacagtccccagtgatattgttcataatatccagagggggaggggatgatattactcccaatattgcaggtggtgtacaaccccctgtgatattctttataatatagagggggatgatgatattactcccaatatagtaaacaacctgtgtgtacaccccctgtgatattgtttataatatccaagggtggaaaggatgatattactcctcatatcgcagggggtgtatacccctctgtgacattgttcctaatattcaggggaggagaagatgatactactcctcatatcacaggggatgtacacccccctgtgatacttttggtaatatccaggggaggagaaaattatattattccccatgtcacagagggtgtacaccccgctgtgatagtgttcataatatccaggtgaaaagaggatgatattactccgaatatctcaggaagtgtacacccttctgtgatattgttcataatatccaaaggtggagaggaggatactactccccatatcgcagtgggtgtacacccccctgtgatatggttcataatatccaatgtaggagaggatgatattactttccatatcgcggagagtgtacatccccctgttatattgtttgtaatattcagggagaaagaggatactactactccccatatcacacggggtgtatattcccctgtgatatggttcctgatatccaagagatattataatcctctcttggattatgctacctctcatatcgcatggggtgtacacacactttgtgatatcgtttgtcatatccaaggagggagaggattatattaatcccaagatcacggggggtgtacaccctcctgtgatattgtttgtaatattaaggggggagaggataatattactcccaatataattaacaccctgtgtgtactcctccttgtaatattgttcataatatccaatgggggagacgatgatattactttcaatatcgcagaggatgtacatccctttgtaacaatgtttgtaatataaaaggcaagagaggatgatactacttccaaaattgcaggacatgtacaccccccggtgatattgttcctaatatccagtggggaagaggatgatagtagtcccaatatcgcaaagggtgtacacaccccctgggatattgttcctaatataaaaggaggagaggatgctattattcccaatatcacagaaggtgtaaaatcccctgtgatattgttcgtaatattcaggaggggagaggattatattactcccaatatcacagggtgtgtacacagggaggggcaagggccagaagcgggcgggaatccccatgtttgggcggacccagtttctaatggccagcatttgccaatcaaagcttaccagagaactctaaaagccagggctttcctgctagacaagactcatttctggaactgctttaaaaagaaacaaaacttcccaaggaccccttttcctctctgtctgcctaaaataatgttttaaaaactcctaaagcagctgaattcagcccccttcctgggggaatgtatagacggaactcccacctttcccggcatcccaaggccagagtatgtgaaactcctgggtctctatgtgtgtctgagcggctgctctgccaacactccacacagccctgtgtcctggacccaaggcccttatgacctgagctcaagaggggatctcctgatccatgggttgcaaagatccatgggagaagcatggtttctggggcggggtcacacgctcagtcactgtttccctcggatgccggagatggttcctttggctctctgccaatacagggtgaatcatcatccatccctcttttctttgttctcccgggtcaagttgtttgcctagtcagtcccaatgtgagaacctgaatatttcagttgacgcgctgacttcaaaatccccgggcttcgggaggcggagcttgcagtgagccgagatcccgccactgcactccagcctgggcgacagagcgagactccgtctcaaaaaaaaaaaaaaaaaaaaaaaaaaaaaagtccccgggcttttcttttcactcagtggaaggcagctgcttctaattggccatcttggcccgcccccaccacgtgaccttctgtaaaatgcctccactctccaggaacgctctcattatataactttgcctgaaaccaacagcacgctcattgcacatatcatgggctcatttatttcacttataaagaacctggccaaggaagagatagtgcctaaagtggccagtattctgaccgatatgttagaaaaatggtgtgccgaccaattcatgacatgtgtcccaaaactagcaacggaaattgtattcgccgtgttgaggtctctaatccagatgatgctcatctatgtactggaaaaggcagagtcctttcctgacaagctgctgaaactcttcagaaacatctcatatttcctgaagaagatgatgtctggacaagcagcacaggtcgttcagatttaactttctattcatatatccagcacgatattcgcacaattgtcacgaaaccttaccagttgatgagtcctgcacatttcctttaatttcaggaggaagagggtaatccggatgagttttctgacctactctgctgctgtgattaaacaaccaccaggaaattttgacgacactgttctcctgagctcctccctttcctccgggaacaaaacaattgaatttacaaaaataaagtgttatttgactggagtgaggtctcatgtctgcttatgcggtggctcgctgctcagaacagggtgagtctctgggttgtgtgctgaggaggggaggctctcaatctggagaaaacccactgcaggggacacctccatggggtctgagggactgaggatgaggagccggactgggtctagggaaggaggaggtttcagagggtgaaattctggcactaaagcctgggggtgtttgggaacttcctccttccgaagaagtttcagggagggataaagacaaaccctgggctccttgaggggcccttactaatttgagaggactctatcgggaaggagagtgacaatggcctccttgaggactgaggcccctgaataaatgaggcccagatacagtccatgggggatgagaccttcaagggtcacattttggttgggacagaggaaaagtgcagctctgcagccgcagaggaaaacccggcagtgtgaaagcgaccttggaggggccctgtgcgctctgaatgcgtctgagcccccatcccctgtccccgcctctctttctggattcttccagctcggctgtctccgccatcttctgagcgctccaccctgacttattcaagtttcccttctgccttccaagtactccaaaatctttcagatctgtgtccctacccctgtttttagcatgtgttggggctccaggtccctgaaggtttctggcctgaaatccacctccccagcggagtggactgcgttctagagactccacactccgcgaggttcccaggcccctgagggacaaccgagtggcctgcgcacttcagggctccacactcggcaaggtctttcaagcccttggggtccccttcttagttttttccacctttctgggctgcagtcactccataaatgctgggatctgatccccacccccactctcgtttcctcaattctgcgggctacacgctctggcaaggtcctccgggccctggatcccctccctctccctatgcccacgctcctagtcagcccttctggggtccactattttcaggaactaaccgttctcatggagccttgctaaccggaaagctgtgtggaagaaaggctttgaggatagaggtggagatttggctcttccatagtgccactcacccaccccaccatgctgccactgccagacccggacccctgtttcagaacaagtgaccagattcgctcctggacagccctggacactggccttttctctgaaaactactcaccctttctctagtccccacttcatgccagcctcataccctcttccttcccccacgctggcttccgggatcctcctctgctcagacaacctcttctgtgtcccacccccgtttttagaatgctttggggcaccaggttgggggaaggtttctggcctgatatccatctctttccaaactcccttcttcccttgaaaggcttcttgccttcagccccacttctggctccgaggtttcaggacaccctcctcttcatcctcattcttttgaccaccagctttttaggaattcgaacgtccctctcatcttcgtgaatcctgtccaggcatttgttgaccccttcatctgatacccctgacctcacattgccaaaagtctacccctacccagtacactggaattagacaaaatcccaggagttttacctcaactctgagtgtgcccacaggagctctccctgaagccacgtccttttaagcagggtctagggttcctcccttgtcttaatgaactctttgtcacacggaggacgttatggagcccttatgatctttcactgcctttctgcccagcgttttgtctttccatggacatttataatattttccatggacattttgttctctcaatgtccacccctaatttccaacatcccaaagattctcatgtgtttcctgaaagccatttacaggaatggctgtgcccagacccccttccccaggatcctccttcacacctggtaggtgcctctcctagagagatttgcactcagttgtcgtgcagtcacatggcccagatggttgttaatcacccccttcctggcaacagctagcagccagggaatcactggcacagaaacctcagggtgaccaagatgaggccacctctgtgctgaaggctgtgctccagagcctgcttgggatcaggcttaagcaggtcttcagccagacctgatgttacctggtttccttgagctgccctgcctgagctatcgggagcactccctcaatgcacatcttgattccctatctcatgctctgcttctagaaaccatgagctatcaattgctactggcaatggtcctgggaagtcaaccctaagtatggattctggggttggatgactccccacaggacttcagtgagcaacaatcactgctggcagttggaggacagagtcgctagggcatgtgaccactgtgaaaccaccgatgtttcacctggggtaattttggatgaactacggtagaagcactgaaggtacattgcttttggtttggaagattgtaggtaaataatagcgatatgaatgtggaattggatggctgcaaacgagtgccattgatgcattgaaagaggaaaagtcaggctgtcacctgtcactcagcaatttaaagtgtgagagttgggactagatgtggtggctcacatctataatccagagattcgggggaagcttgaagaggtaggatcttttgagtccaggagttccagaccagcctggacaccagagcaagacctcatctctacaacaaaattttcttaaaaattagatgggcttggtggcacgcacctgtacttgtagatctagctaatggggagcatgagataaaaaaatcacctgagtcagggacttaggggttacaatgaggtatgattgtgccagtgcacacactcccacctggccaacagagtgagattctgcttccaaaaaaataagaaataaatcaggtttgagagttggaaagcatcatcttctcctagagccaaaggacatgtacaactgagacccaggaacaaagcttcatcacaaagagaccatcatcagtggagccgggagatgcattccccctcaccctgccttgaggaggcagtggagtcatctgtctgggatcctttctgacccagccctatttgtttgtctctttggcttctttggatttgtatattttagctgttataacactgtaaaacaaacagagtgatttttttgagttgtgtgaatgatgctagctccatagtcaccctgagagtgatgggaacttttgaatttgtggcaagttggagggtagtgtaagtgacctgagattgccaaattggggctagcactggatgtgaggttaggctagtggaaaaatatgcccagaaccagaggagtgtgggctcactgcaggtggttaggctcagatccaaattgtacagatggatagctttggggtaaagaataacatagttgagaagtgcatgtgttagtctgttcatgcactgctataaagaattacctgagactgggtaattatttataaaactcaggtttaattgggtcatggttccacaggctgtacaaaaagtatgatgctggccatcagctcaacttctggggaggccccagaatagttagagtcatggcaaaaagtacaagggaagcaggctcatcttccacggccagagctggagcaagtggtaggagaggtgatacacactttcaaacaagtaggtcttttgagaactccatcaccggacagcacctatgggatggtgctaaattattcatgaaatatccgcctccataatccactcaactgtcaccagcgcagccagccccacctccaacagtggggattacaattccatatgaggtgtgggtggggacacagctccaacctcaatcagtgggcatcctggattgggtctactatagaaggagaaccaggagctgactatgatcttgaaccctacccatgatggccgggcggggtgactcatgcctgtaaccccagcactttgggaggctgaggtgggtggatcgcctgaagtcaggagttagagaccagcctggccaacatggtgaaaacctgtctctactaaaaatacaaaaaattagaccggcgttgtgctggatgcctgtaatcacaccactacgctccagcatgggaaaaaataccaaaacttcgtctcaaaaaaaaaaaaaaaaaaaaaaaaaaaaagactgcccatgaccactgcaccagtgagagggacaccagcatcactgagatgcaagggctggacattcttcataggtcagagctcaaagcaggggacactgatacagagatgggctccatccatagcaccaaagtggtgagaggatgtgggaatggcagaggccagcactttgccatcaatgcaagggggtataaggaggtgacaccagtgccagagtacatcacggggggactgccctacaatatctaggacttacctcttagagcgtgtttcattagcgacaacagatataaatggcagacaggtgtgtccctgcattaacaggaaatagaaatcatcaagaggaacagaaggcagatgtcagcagccccttagaaagtcatcatccttcatacagttaaaatctgagacagttctcacacgagaaggcctaactcaaaaagaggctgggttctcatgaggcaggtttatgcaaaaccaaggaaggtgtacaagtttggaattctccagtttcccttggaaaagacctacagtcatttgcttaggtaactgagcactgaacaaaggtgagtattgttgtcttttagaagctcttggccaagaaggccttgttggcataaaacccatggtttggaaacatcaccatgacccctgttagagtaatggcctaagggtgggggtcaggaaattgatgtattccttgccaacttctgcctctaagtgagtgaactctgtttgtgaacctctctcctctgtggttatgttcctaggctctcatgtataatcaggagtcatagacttagaaacaggaaaaatacttacagtgtttttgtggcctgtgagctatgacttataattttaggaaaaaaacaattgcaaatggaaagcctaagtctatcaatgctcatccaagacaacataatcaataaaaaccaatatcaaatctcaaggcaaattatttcctgtatatagatggcagagatgagcaccaccatcaaaaactcaaggaccagtgctgtgggtccagtcatctgtttcatggaattcaccagtctggtatcttcaaaatccagaaggatgatggcagatggcaggaaagtaatgcaaacgtcatcaggtgtgaccccactgtagcagctgtgatggatgttttctctcaccatagcaataaataacacaacctcggtcacactgtatgcattgttggtctgcaaaatccatgttttgcaaaactcttcaggaaggtggatctgtaatattggcattgacatgagaacaacagcagtatttattcacaatctcaagctctctgtcttcccgtctctctcattagccatccaagtagtcctgaggaaccaagcccatcagaacattctgcaacataatacacagctccattctccattcaaattttgttgttgttgttgttgttgatgagacaacatcttactccatcagccaggctgacgtacagtggggctatctgggctgactgtagtcttgagcttccaggctcaaggcatcctctcacctcagcctcctaagtggcttgaactacagacacacagcgacatgctgggctagtttttgtatattttgtagagacgtgctctcaccatgttattcaggctggactcaaactcctgagcgtaagtgatccaagcaccttggcctcaaagtgctgagattacaagcctgagccactgcacccagcccaatctccattctactgataacaatgtcattaccaggtctgatggacaggaaatggtaaggtttctgaaaacctaaggatcacacagcgagttccaaaggctgaaagtgcatacctgtcgacactgataccaatgacatccaatggtgagaatgacattccttgtagtcctagctctgctcataacaaatctatactgaagtgtaagagtttgatggtcatggggattttccatgtctctgcctttcagcgatgtgccatatctgtgaagtgttcagaaatgcaacagcctgaggcatgctgggcatatcctctaataaaaaggaaaatgccattttatggtcctgtatttctacaagttggaacacatgggcctgtgatccagatgggggaaatgggaatattcccactcattcaccttcatccacgaagcccatttgaaagctttgggcttcccatccttgtagattttagtgttgtgggctgggtgcagtggctttcacctgtactgccaacactttgggaggcctagacaggtgaatccactgaggccaaaagttcgagaccagcctggccaagatggtgaaaccccgtccctactaaaaatacaaaaattagcaaggtattggggccagcacctgtaatcccagctgctcgggaggctgaggctggagaatcgcttgaacccaaaaggcagagactgcagtgacccgatcctgcctttgcactccacctgggcaagcagaacaaaacttctgtcttgaaaaaaaaaacaaaaaacgaacaaaaaagatgttagagttctgggtttagaggtctataccccagaaagagaatggtttcaacaagggacaaagaagttgctttaaacgttgacttgccatttcttttcagtgtgtttgttctcttgcgtcaagagaccaccagaaaagtggtgcaattactctcctgtcaagaatcattgactatcatctgcaagagggtcagatcctggtatataattagggcagaaatacttagtctgagaagggtatgacatccagaggccctattaatgatgtccttttctccatgcctgactctgaccccatgtgctggactgcccctgtgtggatggcctcatggcctgctcggactctgaggtcccaccccaagtggcacctccatggagggctctactcttgtatgggctctgacactcacactgagacactctcccatggacacctcttcacccacttggggtctgaaactgggctactccatccctccctaacctggaacagagagctttcactgctattacacaagtcatagaggctaactcctcatttttccaagctaattattgaaacattagtcctgggttgataagacaagataagttaacttttcataaatttgcttatcaagttttgaataaattcaaataaattcaccttccccacacaccttagttgtcgacatcacacgcgcacccatactcacagggtgagcacgaaggcttcactgtcagtggagaaagtggcaaaacccttctgtgcctcatcctggtctagacctggccctcatcctttcccactcttcccctcactcccttggattcatccacactggcctcctgcctgctgctccacctccctgcgaagctcacccctgcctcagggcctttgcacgtgcagtggcttcaagccatatcctcttcacccagatctcccagatctcctgaatgatcttcttttatcattcaggtctcagcttgcatgtaatcttctcagtgaggattacccaaaccacatagttcattcattcattcaaatattcattcaatggcatattgacaaagcagctacttcatgccaggccttgggccaggtgttatggatatggcaacaaacaaaacaagagttttctgctctcaaatttttacccacttaaaggagatatcatacatcatctgtaaataaatacatcatctgtaaataatgatgtaaataaatacatcatctgtaaatctgtaaataatgatgtaaataaatacatcatctgtaaataaataaagtataataaaagaaaatagtaggtttttttggttggaggtgaccgtgaagtttgcaaataccatcttacaacacattattttattttatttcatttcatttttaattttattattattatactttaagttttagggtacatgtgcacaacgtgcagatttgttacatatgtatacatgtgtgaagttggtgtgctgcacccattaactcgtcatttagcattaggtatatctcctaatgctatccttcccccctcccccaccccacaacagtccccggtgtgtgatgttccccttcctgtgtccatgtgttctcattgttcagttcccccctatgagtgagaacatgcggtatttggttttttgtccttgtgatagtttgctgagaatgatggtttccagcttcatccatgtccctacaaaggacacgaactcatcattttttatggctgcatagtattccatggtgtatatgtgccacattttcttcatccagtctatcattgttggatatttgggttggttccaagtctttgctattgtgaagagtgccgcaataaacatacgtgtgcgtgtgtctttatagcagcatgatttataatcctttgggtatatacccagtaatgggatggctgggtcaaatggtatttctagctctagatcactgaggaatcgccacactgacttccacagtggttgaactagtttacagtcccaccaacagtgtaaaagtgttcctatttctccacatcctctccagcacctgttgtttcctgactttttaatgatcgccattctaactggtgtgagatggtatctcactgtggctttgatttgcatttctctgatggccagtgatgatgagcatttcttcatgtgttttttggctgcataaatgtcttcttttgagaaatgtctgttcatatccttcacccactttttgatggggttgtttgtttttttcttgtaaatttgtttgagttcattgtagattctggatattagccctttgtcagatgagtaggttgtgaaaattttctcccattctgcaggttacctgttcactctgatggtagtttcttttgctgtgcagaagctctttagtttaattagatcccatttgtcaattttggcttttgttgccattgcttttggtgttttagacatgaagtccttgcccgtgcctatgacctgaatggaaatgcctgggttttcttctagggtttttatggtttgaggtctaacatgtaagtctttaatccatcttgaattaatttttgtataaggtgtaaggaagggatccagtttcacctttctacatatggctagcctgttttcccagaaccatttattaaatagggaatcctttccccacttcttgtttttgtcaggtgtgtcaaagatcagatagttgtagatatgtgacattatttctgaggactctgttctgttgcattggtctatatctctgttttggtaccagtaccatgctgttttggttactgtagccttgtagtatagtttgaagtcaggtagcatgatgcctccagctttgctcttttggcttaggattgactttgcaatgcggggtcttttttggttccatgtgaactttaaagtagttttttccaattctgtgaagaaagtcattggtagcttgatggggatggcattgaatctataaattaccttgggcagtatggccattttcacgatattgattcttcctacccatgagcatggaatgttcttccatttgtttgtatcctcttttatttcattgagcagtggttttagttctccttgaagaggtccttcacatcccttgtaagttgggttcctaggtattttattccctttgaagcaattgtgaatgggagttcactcatgatttggctctctgtttgtctgttattggtgtataagaatgcttgtgatttttgtacattgattttgtatcctgagactttgctgaagttgcttatcagcttaaggagattttgggctgagacaatgggttttctagatatacaatcatgtcgtctgcaaacagggacaatttgacttcctcttttcctaattgaataccctttatttccttctcctgcctaattgccctggccagaacttccaacactatgttgaataggagtggtgagagagggcatccctgtcttgtgccagttttcaaagggaatgcttccagtttttgcccattcagtatgatattggctgtgggtttgtcatagatagctcttattattttgagatatgtcccatcaatacctaattattgagagttttcagcatgaagggttgttgaattttgtcaaaggccttttctgcatctattgagataatcatgtggtttttgtctttgggtctgtttatatgctggattacatttattgatttgcatatattgaaccagccttgcatcccagggatgaagcccacttgatcatggtggataagctttttgatgtgctgctggattcggtttgccagtattttactgaggacttttgcatcaatgttcatcaaggatattggtctaaaattctcttttttggttgtgtctctgcctggctttggtatcaggatgatgctggcctcataaaatgagttagggaggattccctctttttctattgattggaatagtttcaggaggaatggtaccagttcctccttgtacctctggtagaattgggctgtgaatccatctggtcctggactgtttttggttggtaagctattgattattgccacaatttcagatcctgttattgctctattcagagattcaacttcttcctggtttagtcttgggaaggtgtatgtgtccaggaatttatccatttcttctagattttctagtttatttgcgtagaggtgtttgtagtattctctgatggtagtttgtatttctgtgggatcagtggtgatatcacctttatcattttttattgcatctatttgattcttctctctttttttctttattagtcttgctaccggtctatcaattttgttgatccttttaaaaaaccagctcctggattcattaattttttgaagggttttttgtgtctctatttccttcagttctgctctgattttagttatttcttgccttctgctagcttttgaatgtgtttgctcttgcttttctagttcttttaattgtgatgttagggtgtcaattttggatctttcctgctttctcttgtgggcatttagtgttataaatttccctctacacactgctttgaatgtgtcccagagattgtggtatgttgtgtcttttttctcgttggtttcaaagaacatctttatttctgccttcattttgttatgtacccagtagtcattcaggagcaggttgttcagtttccatgtagttgagcggttttgagtgagtttcttaatcctgagttctagtttgattgcactgtggtctgagagacagtttgttataatttctgttcttttacatttgctgaggagagctttacttccaagtatgtggtcaattttggaataggtgtggtgtgatgctgaaaaaaatgtatattctgttgatttggggtggagagttctgtagatgtctattaggtccgcttggtgcagagctgagttcaaatcctgggtatccttgttaactttctgtctcattgatctgtctaatgttgacagtggggtgttaaagtctcccattattattgtgtgggagtctaagtctctttgtaggtcactcaggacttgctttatgaatctgggtgctcctgtattgggtgcatatatatttaggatagttagctcttcttgttgaattgatccctttaccattatgtaatggccttttttgtctcttacgatatttgttggtttaaagcctgttttatcagagactaggattgcaacacctgcctttttttgttttccattttcttggtagatcttcctccatccctttattttgagcttatgtgtgtctctgcacgtgagatgggtttcctgaatacagcacactgatgggtcttgactctttatccaatttgccagtctgtgtcttttaattggagcatttagcccatttacatttaaggttaatattgttatgtgtgaatttgatcctgtcgttatgatgttagctggttattttgctcattggttgatgcggtttcttcctagccttgatggtctttacaatttggcatgtttttgcagtggctggtactgactgttcctttccatgtttagcgcttccttcaggagctcttttagggcaggtctggtggtgacaaaatccctcagcatttgcttgtctgtaaaggattttatttctccttcacttatgaagcttagtttggctggatatgaaattctgggttgaaaattcttttctttaagaatgttgaatattggcccccactgtcttctggcttctagagtttctgccaagagatcagccgttagtctgatgggcttccctttgtgggtaacccgacctttctctctggctgcccttaacattttttccttcatttcaactttggtgaatctgacaattatgtgtcttggagttgctcttcttgaggagtatctttgtggcattctctgtatttcctgaatttgaatgttggcctgccttgctaggttgcagaagttctcctgggtaatatcctgaagagtgttttccagcttggttccattctccccatcactttcaggtacactaatcaaacgtagatttaatcttttcacatagttccatatttcttggaggctttgtttgtttctttttactctctttcctctaaacttctcttctcacttcatttcattaatttgatcttcattcacttatatactttcttccacttcatcaaatcggctactgaaggtattgcatgcatcatgtagttctcatgccatggttttcagctctatcaggtcatttaaggtcttctgtacattgttttctctacttagccattcgtctaatcttttttcaaggtttttagcttccttgtgatgggtttgaacatcccctttagctcagagatgtttgttattactgaccttctgaagcctgcttctgtcaacttgtcaaagtcattctccatccagctttgttccattgctggtgaggagctgcgatcctttggaggagaagaggtgctctggtttatagaattttcagcttttctgctctggtttctccccatctttgtggttttatctacctttggtctttgataatggtgacctagagatggggttttggtgtggatgtcctttttgttgatgttgatgctgttcctttctgtttgttagttttccttcgaacagtcaggttcctcagctgcaggtctgttggagtttgccggaggtccactccagaccctgtttgcctgggtatcaccagcggaggctgcagaatagcaaatattgcacaacagcaaatattgctgcctgatccttcctctggaagcttcgtctcaaaggggtgcctggctgtatgaggtgtcagttggcccctactgggaggtgtctcccagttaggctagatgggggttagggacccacttgagaaggcagcctgtccattcacagagctcaaacactatgctaggagagccactgctctcttcagtgctgtcagatggggatgtttaagtctgcagaaatttctgctgccttttattcagctatgccctgcccctacagatggagtctacagaggcaggcaggcctcattgagctgcggtgggctcctcccagttcgagcttccagaccactttgtttacctactgaagcctcagaaatggtgaacacccctcccccacccagtctgccgccttgcagttccatctcagactgctgtgctagcagtgagcgaggctccatgggcgtgggacccactgagccaggcacaggatataatctcctggtgtgccatttgctaagaccattggaaaagcacagtattaaggtgggagtgtcccaattttcccagtacagtctgtcacgggttccctcatctaggaaaggtaaatcccctaaccccttgtgcttcccggtgacgcaatgccccaccctgcttcagctagccctccatgggctgcatccactgtccaaccagcccaatgagatgaacaaggtacctcagttggaaatgcagaaatcacccatcttctgtgtggatcaggctgggagctgcagaccggagttgctcctattcggccatcttggaatggcaatctatgtttgctttttacatttgaaaaaactggtgtcacgtacctaggtattaatcattgtggtatcctcttgccgatttacctctttatcattaactagtgaccctccttgtcttttgttgttacagtctgtgattttagtctattttatctaatatgagaatagctactctggcacttttttggtttccagcttcatgaaatatccttttccatttccctgttttcatttccctttcggtgtctctatagatgaagttgatttctttaaggcaccataagttgggtcttatttctttatccatttgaccatttagagaatttagaacactgtcagtgttattattcataagtaaaaacttaagagtgggtgtagtggtgtacatctgtatttcctgcactttgagagactgaggcgagctgatctcctggggtcaggagtttgagaccggcctggtcaacatgatgaaaccctgtctctactaaaaatacaaaaattagccaagcatgctggcatgtgcctgtaatccaatttacttgggaggctgaggcaggagaagcttgaacctgggagacaaatgttgcagtgagctgagatcacacagagaagtcatctccactctcctcatcagaacctcttgttcacagcatttgtgagcacaaatcaatgatggttattctttcctactaattagggatattttattacacagcaatagcctccagcaaagggaaccatcatacatgattcctacaagttgacagggctggaattatcactgaaaaactaaggtggctatacttgattcccaatgtccaatttttcatgaatagagaaatttatcctttttccccccagccagaaaccaagttttgctcttacgcccaggctggaatcaagtggcacaatctcagctcactgcaacctctgccccccagcttcaagaaattcaccttttgaacaaggagatattaaggatacactatgtgtatgctaccggtggttgcaggagactcagaaaagagagaaacagtcactggcctcgtgcaactgatattctcgggaggagagaaaggcaatcaagaaagaaacatgctgtatttcagacagctgtaagtcctccacaagaaaagaaagcaggtgaggaacataggaaatgtgtcaaccataaggttcccgctaattctataagttggtcagggatatcctccaagaataagcagcatctgagcaatcacctgaagggaggaaggaaggaagactgtgagtggtggcttacacctgtaatcccagcactttgggaggccaaggagggcagattgcctgagctcaggagttcacgaccactcagagcaacctgttgatacccaatctctactaaaaacacacaaaaaaattacccgggtgtggtggcacgcacctgtagtcccagcttccatgcccagctgatttctctctctccatatatatatatatatacacatatattgtttttgcagagatagggtctcactgtgtcacccagtcatcaagcaattctcttatactgttttggaaaagcatgggaattacaggtgtgaaataccctgctggtcctgaaaaatgtgatatttgggattctctgcctggcttgttttacccaaaataatgacctccagttccttccaggttgctgcaaaagacatgattttcactgttttataactgaatagtattcctgtatgtatacataccacattttctttatttattcttctgttgattgacatgtagggtgattccatgtctttgctactgtaaataatgctgcagcaaatatttgtgtgcattttgatctattcctttgagtaggtacccagtactgcaactgcaggactgagtagttgttatattttttgttctttcagaaatctccatagtgtttgccataaaatctgcactaatttacattcccaacaacaatgcataagatttccccttttctccacattctcactaacatttgttatgtttttgtctttttcataatacccattctgactggagtaagatatctcattgtggtggttgttgatatttttgagacggggtctcactctgttgccagactggagtgcagtggtgtgatcgtggcttgctgcaacctccacctcccgggttcaagcaattctcctgcctcagcctcccgagtagctgggactacaggcgcgtgccaacaggcctggctcattttttgtatttttagtaaagacagggtttcaccatgttggccaggatgatcacagtctcttgagctcatcatacacctgcctcagcctcccaaagtgttggaattacagtcatgaggcagcgcacccaacctcaatgtggttttaatgaccatttctctgacgattcatggtgtggagaatttctttgaaataccttttggccatttatatgtgctcttttaaaaactgactcctgtccaggtgcggttgagcatgcctgtaaccccagaacttcgggaggctgaggccaatggatcacttgaggcaaagaggcagaaatcagcctggccaacaaggcaaaaccccatctttactaaaaatacaaaaaatcagccacgggctgtgactcgtgcctgtggtgcaagttactcaggaggttaaggcacaggaattgcttgaacccggtaggcacaggtcacagtgagccaagatcatggcactgcactacagcatgggtaatagagaaagacctgtctcataaaaacaaatgaataaataaataagataaaaaataaaaaagtctctttatgtcctttgccgactttttaatgggattctttggagttttctgttgtagttgagatctttgtttactctcggtattagtcttttgtcaaaggaaaagtttacaaataatttcttccgttctgcagtttgtctgctcactctgttgagaggattatttctttggctgtgcagcagctttttgtttcagtaaagcttttgaatttatataattaaaattttcagtttggtttaaatttgcactggtcgatttttggttttgttgcctgtacttttgaagtcatactcttgaactctttactagacaataaccagaagagttttctctagttttcttctcacatttttattatttcagtacatatatttaagtctataattcatcttcaattgatttttgtagaaatagtgagaaataggagtccaggtttattcttctgcaaatgacaattcaattgttccagcaccaattattgaaaagggtgtgctttcctcaacgtatattcttatcagctttgtcaaagatcagttggctataaatgtgtggctttctttctgggctctctagtctgttacatcaatctgtgtgtctatctgtatactactaccatgctgtattggtgatgatggctttgtaatataatttgaagtcaagaaatgtgatgctcccagctttgtttatttgcttcagaaaggctgagtcaacagctgcagagatgaagctgcccctcctcgcagggctccttcccggaaaaagatcatggctcccactgaccatataaccatggctggaactcctgaaattcccaaagggaggccctacccagtgaggggggatgaatgaaggtcctacttaaggaatctgtctggccacaatcaggcacagcagctgtgctgccttgtgggggaccagaccacctggattccctggagcctgcaggctagaatgtctgagtccatggaaacacagaaatggaggccgccctcacctccccagaaaactgtagtctcaggcagtctccagccgattgccactggttggctgctattccaagccagtgggtcttaacttgagaggtgctgtggaagtggggcccacggaatgaggctgcttggctccctggattcagccccttttctaagggaatgtacagatggaactcccgccttgcccagctttccaagtatataaaactcctgagtctctgtgagtgtctgagcgagtgctctggcaacattcgacacggctctgtgtatctgacccaagacccttatggcatgagctaatgggaggatcttctgatccatgcgtggcaaagatgcatgggagaaacatggtttgtgggtaggggttgtgcattcactactgcttctcttggctgtaggtgaaggtttctttggctctgtgctgatactgggtgcaccatcacccaccccctttgtttcttctcctgggtcaagtcatttgcctaatcagtcccaatgtaggaacctggatacttcagttcaaggtgctgaattcaccgtgcttttcattcaggggaagacagctgcttctcattgggcatcttggcctgcccacttcacgtcactttttgtaaaatccacaccactccaggaatatccattacttaacttcgcctgaaataaacagaaggctcattacacttatcatgggctcacttacttcgcctataatgaaggtgccatggaaatgctagtggatgacgtggtccattttcttagggatgagatagaaaaatggtgtatggctttttaatttaattaaaatttttagtttggtttaaatttacattggtctctttttggttttgttgcctgtacttttgaagtcttactcgtgaactctttactggacaatgaccagaagagttttccctaagtttcttctgatattttgaccatttcagtacatacatttcagtctataattcactttaaattgatttttgtaaacatggtaagaaataggagttcagatttattcttccgcatatgataatgcaactgtcccagtaccaattattgaaaagggtgtgctttccctagtgtatattcttgtcagctttgtcaaagatcagttgcctatgaatgtgtggctttcattttggattctctcgtctgttacatcaatctgtgtgtccacatttatacctgtaccatgctgtattggtgactatggctgtgtaatatattttagagttaggaaatgtgatgctcccagctttgttcatttgcttcagctgaaaaggttgagtccacaattacaaagatggcagccgcccatccccggaggacctccaacccagaaagagatcaggcttcccaccaaccctataaccctggctggagttcctgaaattccaacagggaggaccttcccagtgaggagggatgaatcaaggtcaaatttaaagaaacagtctggccactatcaggcacagcagcagtgctgccttgtgggggacccctcctgctccagaccagctgccctccctggagcccgaaggctagattgtctgagtctacggaaacagagacggtggccgccccaaccacccagaactcggtagtctcaggcacttggcttgctatcttgccactgcttggctggtattccaagcccgtgggacttgagaagtgctgtgatgatggggaccacaggatgaggctgtctggctccctgtgatatggctgtgatgagtggaggaacaccagggctcatgtctcacacagaattggagaaaatgacacaaacacatgtacagtggttttatggcgtgcagtttaataggcaagaacgaaggaagagctccccatactgagacagagggaggggggctccaaagccaaaagaggaaacccggagtgctgtggataccaatgagttatatgaagaaactggagggggcggtgtctgatttgcatagggttcaggcgattggttcgaccaggcatgtcatttatgtggcccacggaaaaactggccctcccacctagcctttgaatatgcacgtgccggacaccctgatttcctacactcatggggatatatgggggtggccatatcgccaggcacaggtggggacaagggccagaagagggcgggaatcgctatgtttgggtggacccagtttctaatggccggcatctgcagatcaaggttaccggagaactctaaaagccggggctttcctgctagacaagactcatttctggagctgctttaaaaagaaacaaaacttcccaaggaccccttttcctccctgtctgcccaaaataatttcttaacaactcgtataacacctgaattcagcccccttactgggggaatgtaccaacggaactcccacctttcctggtttctcaaggctagattgtgtaaacctcctgggtctcggtctgtgtctgagcagctgctctgccaacactccacacagccctgtgtactaggcccaaggccgccgtgactcagcccatgggaggatctcctgatttcttggttgcaaagatccatgggagaaaaatggtttctggggcggggtcacacactcatggcttctcttggctgtgcaagaaggttcctttggctctgttccaatatagcgtggttcatcacccacccctgttttctttgttctcctgagtcaagttgtttgcctagtcagtcccaatgtgagaacctgaatatttcagttcacgtgcttatcgtgaaattcactgagactttaattcagtggaaggcagcctcttctaattggccatcttggcccgccccctccacgtcacctcccataaaatggccacgctctccagggacgatgccattatatatctttacgtgaaaccgacagaacacttattacactttttgtgagctcatttacttcacttataatgaacatggccatggaaatgctagtggagaaagtggtcgattttctgatggatgtgataaaaaaatggtttgccgaccaattaatgacatatgtctcaaaactagtaacgagacccttaatcgctgggttgaagtttctaatcaagaagatgctcatctatgtattcaacaaagcagcttcccttgcttctgaaatgcttccaaacaacatctcatatttcctgaagaagataatgcctggacaagcagcacaagtcattcaggtttactttcagctcataaatccagcaggatattcgcacaattgttgggaaaccttatcagttcatgagtcgtgcatgtttcctttaatttcaggaggaagagggtaatctggaagagtttcctgacctactctgctgctgtgattaaacaaccaccaggaaattttgatgacactgttctcctgagctcctccctttcctcggggaagaaaagcattgaaactacaaaaataaagtgttatttggctggagtgaggtctcatgtctgcttatgcggtggctcgctgctcagaacagggtgagtctctgagttgtacgctgaggaggggaggctgtcaatctagaaaaaacccattgcatgggacacctccatggggtctggggggctgaggatgaggagctggactggatctagggaaggaggaggtttcagagggtgaaattctggcagtaaatcctgggggtgtttgaaaacttcctccctcagaaggagaagactcagggaggaataaggacaaaccatgggtcccttgaggggcatttactaacttaagaggactttatcgggaagcagagtgacaatggcctccttgaggactgaggcccctggataaatgaggcccagatccagatccagtccatgggagatgagaccttcaagggacatatttttgttgggacagaggaaaagtgcagctctgcagctgcagaggaagccttggcagtgtgaaagcgaccttggagggggccctgtgcgttctgaatgcttctgaggtccatcccctgtccccgcctctttttctggattttttgggctccatggtctccgccatcttctgagcgctccacgctgccaccttcagttttctcttctgggctccaaatactccaaaatctttcatatctgtgcccctacccctgtttttagcatgtgttgggactccaggtccctgaaggtttctggcctgaaatccacctccccagcggtgtggattctgctctagagaccccgcacttggcaaggttcccaggcccctgggggacaaccgagtggtatgtgcacttcagggctccacactcggcaaggtctttcaagcccttggggttccctcctcagttttcttcacatgtctgggatgtagtcactctataaatgccgggatgtgatccccaccccagtgattttttttagttccatgagtgttgctatctgaatagtcatcctgagagtgatgggaccttttgaatttgcagcaagttttagattagtgtgagtggcctgagatcgcaaaactggggctagcattggatgtgaggttaggctggtggaaaaatttgcccagaacctgaggagtgtgggctcactgcaggtggttaggatcagcacagaattgcaaggatgtatagctttggggtaaagaataacatggttcagaagtacatgtattagtcttttcatgcattgctataaagaattacctgagactgggtaattaattataaaaactcaggtttaattggctcatggttccacaggctgtacaaaaaggatgatgctggccatcagctcaacttctggggaggcgtcagaaaacttagagtcatggcaaaaagcacaagggaatcaggctcatcctccatggccagagctggagctagtggtaggagaggtgctgcacacttttgaacaatcagatctttttagaactctatcaccagacagcacctagaggatggtgctaaattattcatgaaatatccacccatatgatccactcaattctcaccggcccaaccaggaccacctccaccattggggattacaattacacatgagatgtgggtggggacacagatccaaactcgatcagtgggcatcttggactgggtctactatagaagaagaaccaggagctgactatcatccttaagactgcccatgatggccaggcagggtggctcatgcctgtaatcccagcactttgggaagccaaggtgggtgaatcccctgaggtcaggagtttgagaccagcctcgccaacatggtgaaaccctgcctctactaaaaacacaaaaaattagatgggtgttgtgccagacgcctgtaatcacagctactccagaggctgaggcatgagaattgcttgaacctgggaggcggaggtggcggtgagccccaatcgcactgctacactccagcatgggcaacaataccaaaacatcgtctcaaaaaaaaaaaaaaaaaaaaaaaaggctgcccatgaccactgccccagtgagagggacaccagcatggctaagatcaagtgctggacattcttcatgggtcagacattaaagcaggccacactgttacagagatgggctccattcatagcaacaaagtggtgagaagatgtgggaatggcagaggccagcactttgccatcaatgcaaggtgggcataaggagctggcaccagtgccagagtgcatcaggggaggactgctttgcaatatctagcacttacctcttagagtatgtttcattagggacaacagatataaatggcagacaagtgagtcccttcagtaacaggaaatagaaatcatcaagaggaacagaaacagatgtcagcagccctcatataaagtcatcatccttcatccagttaaaacctgagacagttctcacataagaaggtctaattcaaaaagagactgggttctcatgaggcaggttcatgcaaaaccaagggaagtatacaactttgggattctccagcttcccttggaaaagacctacaatcatttgcttaggtaactgagcactgaacaaaggtgagtattgttatctttcagaagctgttggccatgaaggtcttgctggcataaaacccatggttggaaacatcaccatgacccctgttagagtaatggcctaagggcaagggtcaggaaattgatgtattccttgccaacttctgcgagacgagtgttggtccactcatctctttcacggaattcaccagtctggtatcttcaaaatccagaaggatgatggcagatggcaggaaactaatgcaaacaccatcagttgtacctccactgtagcagcagtaatggatgttatctcttcattgtaatatccagggagggagaagatgacattattctcaatattctaaacaccctgtgtgtacagcctctgtgatattttttgtaatatccgtgtgggagagaattatattactcctaatatctcaggggttgtgccccctctgtgacaatgttcctaacacccaggaggggataggatgatatcacttttagcatcacagggggtgtacaccccactgtaatattgttcataatatccgggggggagagaatgatattactcccaatatcgcaaagactgtacaccaacctgtgatattatttgtaatatccataagaggaagaataatattactcccaatgtcacaggaagtgtacacccttctgtgatattgttcaaaagatccagttagggaggggatgatattactctcaatatcttaaacaccctgtaggtaagccctctgtgatattcctcataatatccagagggagaggatgatattactcccaatattgcatgaagtctacaccccacctgtgatattgttcctaatatccaggatgggagaggatgatattactcccaatgtcgcaggggatgtacaccttccctgtaatattgttcgtaatatctagaaaaggagaggataatattactttcaacatcgcagggggtgtacaccttccttgttatattgttgctaatatccagggaaaaagaagatgacattaccaccactattgcagaaggtgtacacccccccttgatatagttcctaatatccagaaaaggagaggagatattactccaaatattgcaagaggtgtacattcccctgtaatatttttcctaacattcaggaagaaagagagtgatattgcccttaatattgaagggagtgtgccccccccgtgatattgtttctaatatccaagaaatgaaaggatgatattactcccaatatcacaggggctgtacagccccctcccatgatattgttcccaacatcggggggggggtgaaatagtattattcccagtatcacaataggtgtacacacctgtcgtgatattgttcctaatacccatgggggaaaggacgatattattcttaatatctcagagggatgtacaccctccctgtgatattgttcctaatatccggggtgggagaggatgatattacccccaaaatctcaaagggtgtacacccctcttgtgatattgttcctaatatccagggtggagaggataatattattcccaatatccaggaaaggaaacgatgatgttactgtgaatattccagggggtgtcctcccctctgtgatattgttcctaatatccaggttggggagattatgatatttctccaaatatcacaaggggtgtacaccaaccctgtgttattgttcctaatatcgatggggggagaggacgatattactcccaatatcacagggggtgtacaccacctttatgatattgttcctaatatccatgaagaaagaggatgatattactttcaatatcgcaggggatgtacactccccctgtgatattgttagtaatacctaggagaagaaagtgtgatattactcccaatatcgcaggggatgtacacgcttcctgtgatattgttcctaatatttagggggaaaggggatgatattactcccaatatcgaatggtgtgtacacccccccgtgattctttttttttttttttttttttttttgagatggagtcttgctctgccgcccagactggcgtgcaatggcgcaatctcggctcactgcaacatttgcctcccaggttcgcacgattctcctgcctcagccttcggagtagctgggattataggcagctgtcaccataccaggctaatttttgtatttttagtagagttggggtttcaccatgttggtcaggctggtcttgaattcctgacctcaaataatccacccaccttggcctcccaaagtcctgggattacaggcataactttccctgtgatattcttcctaatattcaggaagaaagaggatgatattgctcccaatatcgcagagagtgtgcactcctcctgtgatatggttcttaatattcagaggaggagaggatgatattactttctatattgcagaaggtgtacacctccctcgtgatgtctttcctaatatccagtgggggagaggttattagtctcaaaatcacagaaggtgtaaacccccatttgatattgttcctaatattcaggggtggggagagaaaggtattactcctagtatttcagggcatgaacacccccaccgtgatatcattcctaatatccagaaggggaggcaatgatatttctcctaatatcacaaagggtgtacaccccttctgtgatattgtaaatattctgtgtgtacacccccctgtgttatagtctgtaatatccgggtgggggagagggtgatatttctccccatattgtaggggatgtacacccttctgtgatatggttcgttatatccagggaagaaaaaggtaatattgctgcccatattgtggagagtgtacacccccatgtaatatggttcgtaatatccaggagtggagagggtgatactgctccttacatcgaggaaggtgtacaccttattgttatatgattcgcaatatccaggggaggagagagtgatattgctccccatgtcgcagggggtgtaaaccctccgtgatatgattggtaatatccaggaaaggaaagggtgatatttctccccatatcgcgggggacgtacatcctcctgtgatatggttcgtaatatccaggaggaaagaggaaaatattgctcttcataacccgaggggtgtacaacccctgtgatatggttcgtaatacccagaagtgtacacccctctgtgatatggtttgtaatatccagggggttagagggtgatattgctccccatatcgcagtgggggtacacccccctggattggttcataatattcatggggggagaaatttacatttatcctcatatcagggggggtgtacaccccccgtgatatggttcgtaatatccaggggaagaaagggtgatattgctccttatatcgcggaaggatcaccctcccctgtgatatggttcataatacccagacgggaagagggtgatattgttcttcataaagcgaagggtgtacagccccctgtgatatggttcataatatgcaaaaggggagagggtgatattgctccccatatcacggagggtgtactcccttctttgatatggttcgtaatatccaggggtgtagatggtgatatagctcgccctattggggagggtgttcacccctctgtgatattgttcgtaatgtccagggaaagagaggatgatattactcccaatatcgcagaaggtttacaccactctgtgatattgttcataatatccagggaaggagaagacgatattactcccaatatggcagggggtgtagaactcctgtgatattgtttgtaatatccaggcaaggagaggatattactctcaatatcgcagaaggtttacacccctatgtgatactgttcatgatatccagggaaaaagaggatattactccctatatcacaaagggtgtacacccctttgtgatattttttgtaatatccaggggagagaggataatattactctcaatatcagaaggggtgaaaaccctcctgtgtcattgttcataatatttagggaaggagagagtgatattactccaaatatcacagtgggtgtacacccccctatgatattgttcctaatttccagaaggggagatatgatattattgccaatatcgcagaaggtgtacaccttactctgacattgtttgtaatatccagatggggaaatgatgatattactcctaatatcacagggggtgtacacccccttgttttattgtttgtaatattcaggggaagagacgattatattactcccaatatcgcagggtgtgtacaacactctatgatattgttcataatatccaggggaggagaggaagtgtacacccccccgtgatattgttcgtaatatccagaggtagagaggatgatattactcccaatattgcaggtggtgtacacctttctgtgatattgtcatgatattaagaaggggagaggatgatattactaacaatatcacaaaaactgtacactccctgtgatattgttcataatatccagaagaagggaggatgatattattctgaatctcgcagaagatatacaccaccctgtgatatggttcataatatcctaggggaaagaggatgacataactgtcaatatcgcagggggtgtacaattccctgtgatattgttcacaatattcagagggaaaaaggataatattactttcaatatcgcaggcggtgtacacattactgtgttattgtttataatatccggaatgagagaaaattttctcccaatatcacaggaggtgtacactcccctgtgatattgttcgtaatatccagggaggggagaggatactattactcccaacatctcagggagtgtaggccccccctttgatattgttcctaatattcggaagtggagaagatgatattacttccaaaatcgcagggggtgtacactccctctgtaatattgtttctaatattcatgagtggaaagaaagatattactcccagtattgcaggggacatacaccacactgtgatcttgttcacaatattcgggggggagaggatgatattactcccaatatcaaagtaggtgtacacccccttctgatattgatcgtaatatccagaattaaagatgataacgttactcccaatattgcagggggtgtacatttttgaatactgttcataatattaagagggggaggggatgatatctgtcccaatatcgcaaagtgtgtacacctcctgtgacattgtcccaaatatccagaggaaaaaaggatgttattactcttaatatctcagagagtgtacacctccctgtgatattgtttgtaacatccagaagaaagaggctgatattactcttaatatcgcagggggtgtacacccccgccccgggatattattcgtaatatccagggggaagtggaatgttcagaatgggagaggatgatattacttgcaatatcatagtgggtgtacaccccactgtgatattgtttgtaatatccgggaaaggagaaaatgacattcctccccatatggcaggggctgtacaccacctatcatattgttcaaaatatccagaaggggagaggatatgtctccaagtatcacagggggtgtacaccccgctgtaatattcttcctaatatccagggtgtgagaggataatagtactcccaatatcccagggcatgtacaccccccttgtgatgttgttcctaaaattcatggggagaaagaatattactcccaatatcacagggggtgtacatacactctgtaatattgttgccaatatgcagcaggagagaggatgatattactcccaatatcacaggggctgtacaccccgctgggatattgtttctaatatcaagggggaaaaaggatgatattactcccaatgtcgcagggtgtgtacttcctctttgtgacattgttcctaatatccaggagagaagagggtgacattccttccaaaactgaaaggggtgtacacaccctttgagatattgtctttaatatccagaacgaaacaggatgatataactcctaatactgcaggggggtacaccctctctgtgatactgtttctaatatccaggaggggaaagaaaaatattaatcccaatatcacagggggtgtacattccccctttaatattgttcctaatatccaggaagacacaggatgatactatttccagcagcacagggcatgtacacccctttgtgatattgttcctaatatccaggaaaagagaggatgatattactgtcaatattgcagggcgtatacactggttctgtgatattgtttctaatatccgggggtggagaaaatgatattactcccaatattccagcgggtgtacacccgttctatgatattgttcctaatatctgggggagagagaatgatattattgtcaatatcacaggggatgtacagattccctgtgatattgtttctaatattcacagggggagaagggtataatactcccgatatcgcagggggtgtacactccccctgtgaagttgttcctaatatccagggattgagagaatgatattactcccaatatcacaggcggtgtaaaccccctgtgtgatattgttcctaacatccagaggaaaagatgatgatattattttcaatatcacagggggtgtacgcatccctgtgatattgtttctaatatccaggggaggagaggatgatattattgttaatatcgcagggggtgtaccccaccctgtgatactgttcctaatatccggggtggaagaggataatattgctcccaatatcgcaaagggtgtacaaccttcctgagatattggtcctaatatccagggagggagaggatgatattactttcaatatcacagggagtttacacaacccctgcgatattgttcctaatatccagcggaagaagagttaggataatactattttcaaaattgctgggtctgtaccccctccccgtgatattgtttctaatatccaggaggggagaaagtaatatgactcccaatatcttagaagatgtacaccctccccataatattatttcttacatccagggggtagaggatgattttgctttcaatatcacagagggagtaaacctttccggtgatattgtttttaatatttaaaaagagagaagataaaattactcccaatacaaaggggatgtattgtgtactcccccctctgatattcttttttaatatccagatggagagaggatgatattactttcaatattgcatgggatgtataaatcccctgtgttattgttctgaatatacaggtggggagagtatgatattactccaaatatcgcagggggttctttccccctgtgatattgttcctaacattcagggagggagaggatgatattactcttaatattgcagggggtgtacccacgcctatgatattgttcctaatatccagagggggagaggatgatctaactcagaatatgacaaggggtgtacacacagcctgtgatatggttcctaatatacaggggagaaggggataatatttctcccaatatcgcagggggtgtacaaccccctgtgatactgttcctaatatacagaaggggacagcatgatattgttcctaatatcgcaggaggtgtacaacgccctgtgatattgttcctaatatccagggcgggagaggatgatattaccctcaatatcgcagggggtgtgcactttccctgttatattgttcctatgatccgggtggggggaaatgacattagtcccaatatcgcaggatgtgtgcaccgctcccccgtgatattgttcctaatatcaagggggagagaggaggatattactcccaatatcgcaagggatgtacatcctccatgcgatattgttcgtaatattcaggaggagagaggatgatattactcttaatatcgcagaaagtggacacccaccctgtgatgttcttcataatatccagggaagcagacgattatatgactttcaatatcgctgggagtgtacatcccttttgggatattgtttctaatatccaggaagggagaggattatattactctcagtattgcaggcagtgtacaccttttttgtgatattgttcctaatattcagaaagggaaaggatgatattactcccaatattgcaggtggtgtatatccccctctgatattgttccttatatcaaggaagagaaagaataatattactcccaatatcaaagacagtgtagacccctcctgtgatattgtatttaatatccatggggaaagaggatgatgttactcccaatatcgcagggggtttacacccacactgtgatattattcctaaaatccagtggaggagaaaataatattgctcccaatattgcagggtgtatacaggccctcccccgttatattgctcctaatatccagcggtggagaggatattactttcaatttgtgtagggagtgtatacccccctgtgatatttttctaatatcaaggatgggaaaggatgacattactcccaatatcgcaggaggtgtacacgccctgtgatattgttcctaatatctagggaaggagaggatgatattactttcaatattgcaggagctgtacaccctctgtggtattgttcttaatatttaggttgggagaaaatgatatgagtccaaatatcgcagaaggcatacacacttccaataacattgttcttaatatccgggggagagggtgatattactcccaaaatctctggggggtgtacacccccttctgatatttttcctaatatccagggaaggaaacgatgatattactataaatattccaaggagtgtacaccttcctaatatcctaatattgttcctaatatccaggggtgggagaggattatattactcccgatatcgcagtgggtgtacacccctcctgtgatattgtttctaatatccaagctaggagaaaatgatatcactctcaataccacagggggtgtacaccttccgcatcatattgttcctaatattcagagggaaagaagatgaagttactttcaatatcggaggggttgtacacaacccctgtgatattgctgctagtatccaggaagaaaggggattatgttactccccttatagcagggggtatacacctcccctgtaatattgttcctaatatcaaggctgggatatacgtggggggaaggatgatattactcccaatatcgcaggggttatacaaccttctgtgatattgctcctagtaaccagggcagaagaagatgatattactcctaatatcgcaggaggtgtacactcccccattatgttgttcccaatatgcagaaaaggagaggatgacattattgccagtatcgcagggtgtgtacaccacccctgtaatattgttccaaatatttagggggagagaggatgatattactcccaacatcgcagggggtgtacacacatcccctgtaatatagttcttaaaatctaggggaaaaggggatcttatttctctaaatattgcagagggtgtacactccccggtgatattgttcctaatagccgggagggagataattaaattactttcaatatctcagagagtgtacatcgcccttgcgatattgttcctaatatccagagcaaaagagaatgatattactcccaatatcttaggagtgtacatttaacctgtaatattgttcctaatatccagggggaagagaatagtattactgccaatatcgtaggggttgtacaccttttctgtgatattgttgcaaatatttagtagagggaaagaatattactcgcaatatcacagggaatgtatacttcccctgtgatattgttctgatatccagaaaaagagagggtaatattactcccaatattgcagggggtgtacaccccccttgtgatattgatcctaatataaaggaaggaagaggatattactcctcatatagaaggggttgtccaccccccttgtgatattattcctaatattcagggaagcagaggatgatattattttcaatatcacagagggtgtgcagtccacctgtgatattgttcttaatattcggggggagaggatgttattatgcctgatatcgcagtagaggtacacccctcaagtgatactgttcctaataaccaggggtgaagaggatgatattactcccaatatcgcaggtggtgtacacccccccatgatggtttctaatatacagagggggagaggaaaatattactcccaaaatcgctggaggtctacaccccccttgtgatattgttcctaatatccaggaaaggaaacgatgatattactgtgaatattccagggggtgtacacccgctttgtaatattgttcctcatatccagggtgtggagaggattatattactcccagtatcgcagggggtgcacgacgcccctgtgatattgtttttcatatccaggaggggagattattatcaatatggcaaggggtgaacaccccctgtgatattgtacttaatagttaggttggcagaaaatgatattagtctcgatatcgcagggggtgtgcactccgcctggtgatattgcttttaatatcaagggggagaaaatggcattactcccaatatcgcagggggtgtacaccgctcatgtgatattgttcctaatatccaggtggagagaacataatattactcccaatatcgcacaaggtgtacacccctcctgtgatatggttcctaatatccatgggaggagatgatgatattactcccaatatcacaggggatgtacaccacccttgtgatattgttcctaatatccagggaagaaaacgatgatattattgtgaatattacagggagtgtacacactccctgtgatattgtttttgatatacagggtgggagaggatgatattactcccaatatcacataaggtgtacaccccccgtgatattgttctaaatatttcggtggggagaaaatgatattagtctccatatcacagggggtgtgtgctcctcaggtgatattgtttttaatatcaagagggggaggagattatattactttcattatcacagggggtgtacacccctcctgtgatattgttccttatatccaggcgaggggaaaataatattactctcaatatcgcaggaggtgtacacaccccatgtgatattgttcctaatattaagggggaaagaagataatattactttcaatatcacagggtttgtactcctttcttgtgatatagtttttagtatccagggggaaagagcatgatattactcccattgtagcaaggggtgtacacacctcctgtgatattgttcctaatatccagaagtggtgaggatgatattactcccaatatcgcagggggtatacaccccacctatgatattatttctaatatccatgggaaaagagtatgatattacacccaatgtcgcagagggtgtgtatttttcctgtgatattgtttctaatattcaggcggggagaagatgatattactctcaatatagcagaaattgtacatccccgctgtgatattcttcataataatcagggaaaaagaggatgatattactaccaatattgcaggggggttacacttcccctatggtagtgttcctaatatccaggaagaaagaggatgatattaatcccattatccaggaagtgtacacccaccctgtcatgttgttcctaatatccagcagggaagaggatgatattacaccccccccccgtgatattctccttaatatccaggaggggagaggctgatattactggatatatagcaggggtgttcataccttctgtgatattgttcctaatatccagaaaaggagaggatgatattacttccaatatcgcagaaggtgtacacctccctgtgatattgatcctgacattcagaaggggagaggatgatattactcaaaataccgcagggcatgtgcattcccttgtgatattgttcctaatacccagaagggaacaggataatattactttcaatatcgcagggagtgcacacccccctttggtatggttcttaatatccagaaggaaagagggtgctattactttccatattgcaaggggtgtacaccccactgtggtatggttcataatatccaggcagggagagggtgctattactccccacagtgcggggcatgtacaccctgctgcggtacggttcctaatatccagggggagagaggatgctatgactccctatatcgcggggtgtgtacacccctgtgtggtatgttttgtattctccaggaacggagagggtgttgttacccctcatatcgctggaaatgtacactcccctgtggtatggttcgtaatatccaggggattgagggtactgttacccccatactccccatatcgtggggggagtgcacctccctgtggtatggttcgaaatatccagggtaagagagggtgctattattccccattttgcaggaggcgtacacccccctatggtatggttcgtaatatccggggtgaggggatgctatcaaaagaagagagaaagagaccccccatattgttctatattattttatactcagtacctgttttaagaagaaacaaggaagtgaaaccaaaagcaggcagcccggcgccaggcaccagacccaaaaccagacccgaaaccaggcctgggcctgcctgaccttagcctgatagttaaaattcaacccatgacctagcaaccaatgttatccatagattccagacattgtatggaaggacattgtgaaatttcttgttctgtgctgtttcactctgattaccggtgcctgcagcccctgtcacatacccactagattgctcaatcaatcatggccctttcatgtaagatctttagtgttgtgagcccttaaaaaggacagaaattgtgcactcaacaagctcggattttgagacgctagtctttcgatgcttccagctgattaaaagccacttccttcactacctcggtgtctgtggggttttgtccgcgactcctcctgctacactatgactccccatatcaaggggggtgtacacccccctgtggttcgtaatatccagcaggggaaaaggtgctattactccccatattgcagggagtgtacacccccttgtagtatggatcgtaaaatcaaggggggagggaaggtgtaattatccccatatctcagggggtgtacacccctttgtggtaaagtttgtaatatccagggatattacagggatattatccccaaattaatacttttataatttcttatgcctgcctttactgcaatctctgaacataaattgtgaagatttcatggacatttatcacttccccaatcaatacttttataatttcctatgcctgtctttactttaatctcttaatctcatcatctttgtgagctgaggatgtatgtcgcctcaggaccctgtgatgattgcattaactccacaaattgtttataaaacatgtgtatttgaacaatatgaaatctgggcaccctgaaaaagaacaggataagagcgatgttcagcgaacaagggagataagcataaggtctgactgcctgtggggctgggcagaacagagtcacatttttcttattgcagaaaatgagtaggagaaatatcactgggaagggaacgcattcctaggggaggcctatggacggccgctctgggggtgtatcccttatgtggttgaagataagggatgaaatacaccctggtcccctgcagtgccctcaggcttgctaggattagaaattccagcctggcgaattctagtcagaccagttctctgctcttgaaccccgtttcctgttaagatgtttatcaatgacaatgcgtgcacagcaggacatggaacctcaatagtaattccattttctccctggccttgtgaccttgctaggcccttctgcccttgtgatcttttattgccatttgaagcatgtgatctctgtgacccactccctattcgtatccccctccccttttgaagtccctaataaaaacttgctggttttgcagatcaggtggtcatcacagaacctgccgatatgtgatgtcaccccggaggctcagctgtaaaatttctctttcgtactctttcactttatttctcagaccaggtgacacttaaggaaaatagaaaagaacctactttgaaatattgggggctagttcccccaatagacattgttcctaatatccagaaaaaaagaagatgatattactcccaatatcacaggggttgtgaaccccacctgtgatatggttcctaatatccaggaagggagagaatgatattactctccatattgcagggggtgtgcacatccctgtgatattgttcctaatatccaggggaggagagggtgatattactcccaatattgcaagggttgtaaactccaccctgtaatattgctcctaatatttaggatttagggggggagaggataatattactcccaatatcgcaggggatgtatatgccctctttgatattgttcctaatatccagggggggagaggataatattactttccatatcacaaagagtgttcacccccctgtgatattgttcctaatatccaaaaaggaagaggatgatatcaatcccaatatcacaggaagtgtacaccccccccttttatattgtttctaatatccaggggaaatgagggtgatatttctctcaatatagcagaatgggtacactccccctgggatattattcctaatatccaggggaaaaaaagaggttgatattcttcccagtatagcagggaatgaatacaccctttgtgatattgcttctaatatcaaggggaaaagaggatgatatgactcccaatatcacaggggatgtaaacctgtggcgttgttgctaatatcaaggagggaagagtatgatattactcctaatgtcgccgaaggtgcacactttccctgtgatattgttcctaatatccaaaagggaagagaatgatattacccccagtattgcagggtgtacaccacccctgtgatattgctcctaatacccaggaaaaaagagaatgctattacccccaatatctaaggggacgtataccttccctgtgatattgtttctaatatccaagtggggagaggatggttttactctcaatattgcagggagtgtacactccccctgtgatactgtttctaatactcgggctgggagaaatagtattactcccaatatcgcagtgatattgtttccctgtgatattgtttctaatatctagtgggggagataattatattactaccccatacacaggggagggtgtacattcccctgtgatattgtttgtaatatccagggaaggagaggatgttactcccaatatcacaggggttgtacaccccttttttgatattgttcctaatatctggggggcagagaattatattactgtcaatatcacagagtgtgtacaccccctctgttatattactctttatattcagggcggtagaggatgatattactccctatatcacagggggtgttcacccctcctgtgatattgtttataatatctaaggggaaagaggatgatatcactctcaatatcaaaggaaatgtacacctttcctgtgatattgtttttattatataggggggcagaggatgatattaagaacaataccacaggggatgtacacccacgtattgatattgtccctaatatgtatggggaaagaggacagtgtaactcccgatatcgcagagtgtgtacacccccttgtgatattgtttctgatatacacggggagaaaagataatatttcttccaaaattgcagggggtgtacaaccccctgtgatattgtttttaatatccagtgggggagagaatattactcccaatattgcagggcgtgtacacaacccctgtgatattgttcctaatatccagagtaggggaggatgacattactttcaatatcgcaaggggtgtacattcccctgtgatattgctcctaatatccatgaggggagaggatgatattattcctaatatggcaggggctgtacaccttccctgtgatattgtttctaacatccagtgggggagaaaatgatattactccctatatcacagaaggtgtacactttccctgtgatattgttcctaatatccagaaggggagaggataatattactcccaatatcgcaggaagcttacaactcccctgtgatattgtttctaatatccagggaggtagggatgatattactcccaatatcgcaggggatgtacactcccccgtgacattgtttctaataaccagggggtgagaggatgatattacgcttaataccgaagggggtgtacacacccttgtgatattgtgcctaatagccagggggaagaaaattatattaattttaatatttatggggaaaaaggatgatattactcccaatatcacaggggctgtacaccgaccttttgatattgtttttaatatccagaagagaagaggataatattgctcccaatatcagaaaaggtgtaaaccccttctgtgatattggtcctaatatccagggagggagagaataatattactaccaatatcacagaaggtgcccacccccaaggtgatattgctcctaatatccaaagataatagggtgatgttactcccaatatcacaggaggtgttcacaccccttgtgatattgtttctaacgtacagggaagggagaggatgatattattcccaatatcacaggaggtgtatactcctctgtgatattgattttaatattcggggggaaaggatgatattactccctatatcgcagagggtgtacaccctctgtaatattgatcctaatatccagggcgggataggatgatattactcccaatatcgcagaaagtctacacaacccccagtaatattgtttttactatccagggggaagaggatgacattactcccaatttcacagagtgtgtacactcaccatttgatattgtttctaatatctagggggagagaatatattactcccaatatcacaggaattgtacaccacctctgtgacattcttgtgaatatccggggaaaaagagaataatattactcccaatattgcagagcgtgtacacccctccatgatatcgatactaatatttttttaaagaggatgatattactcccattgtcacaggatgtgtacaccccccttgtgaaattgttcataatattctggggggagagcataatattactccccatatcgaaaaaggtgtccaccctccttataatatggttcctaatatccaggatattacttaatccaggatacttgtaataccctaaatatacaattgcttgaacctccacctcccaggttcaagcaattcttctgcctcagcctcccgagtagctgggactacaggggcacaccaccacacccagctaatttttttttcttgtatttttagtagagatggggttttgccatattggccaggctggtctcaaactcctgaccttgtgatctgcccacctcagcctcccaaagtgctgggattataggcgtgacccaccgtgccaagccaggaagaggatgctctatagatttccccaataagagatggctttgcagggccattccaaaatatgtcaaagaaatacatttggggataaaatactttgatttcctttagggaatgttatctattatgtgatgctataccagagtcaggttggagtcggttatcttattgcaacaaagagtctgttccgtcactgttgggatctctattttttcctcttatttcttgagacagggtctcactctgtcacccagtctggagtgcagtggtgcgatcttcattcactgaaacctctgcctcctgtgttcaggtgattctcgtgcctcagccccttaagtaactaggattacaggtgtgcgccaccacacccagctaatttttgtattttcagtagagatggtattttgccctgttggccaggctggtcttgaactcctggcctcgtgtcatctgcccacctcgacctcccaaagtgctgggactgcaaatgtgagctattgtgcccagccaggatctctgttttaatgttagtgctggtcactttgcatgaactccaaagggaagaaatataatgaggtgtgtctgaccccctgccttctcatcgtgacctgaattagtttttcaggtttgcaggggatacccttggacaagaaggggctctattcggttggttggggggattagaattttactttttgtttacaatatttctcctgaaagagttaggggctcacaaggaatttccgcgtgagcaacttatgaggaaagccatctgggaagatatgtgtccttgtgtcactgggatattctcgtttaccccaatgatacggcaatgacgcagggttgtgaaattacagctatgtgtttggggaaaaaagaaagcaggattgtgtgactacgtttccaaacttcacttgcccttagccatagtgagttgggggcctggagattctgttttctttcacaatgatatagatacaattaaatgtatagaaagcaaaaaaataaaaaggtgagtaatgaggaacctctgattcctgagtggccatgtagttacccatggcacagagccacagttactgaaggtaaagtttgctggggaatttagaaatgaatccagctcttggaggagtcagtttactggatgcctaagaaaatgcaaacaaaataagaaaaaagggtaatattcaatcccatagttattgttacctgtcatagctaaagtaaaattaaaacagagtgctggcttcaatcttgatgctacactaagcttagatttcagtgaatgtgagtctcagccactagctcagagccacctcccaaagaccaaatcatgtagggacaatagaaagtacttctgagaattgtggttaccaagaacctagtaactgttggggaggagcaaaacaaagtacagaaaccagagggtacaatctgagtgagactgctatcagcttctggaggagcctttactaaaatgaatgatgagagtaactggatgatgagagtaactaatggatgatgagagtaagcaatgtctttggttttcttttttttttttttttttttttagcagacgtctcactcttgtcgcccaggctggagtgtaatggcatgatctcgcctcactgcaacctccacctcctgggttcaagcaattctcctgtctcagcctcccgagtagctgggactacaggcactcatcaccacacctggctaatttttgtatttttagtattttctggtgagggtccaggtttccggaaacaactcagagacatatgttaagatgttatctttagttttcacagggaaccaaatatgttacgactccaatttccttggctattgttttaagttaccattaccttctcgttgatcaagttgctcatttacttctcaagcctagctagatgcctggaatttcccttgaaggaagtcaagattttcctttatctccatactggctgatggtgatcgagtaagcccctaagaggggtccctgctccatctcgagatgctgctagattctacagtgcctaataaacagctctcgcctggccgacaaagagctgcttgctctctggatagcaattccaaagtgaacagacaacatcctgtttggaagactgccactctgttagaagaagcatcaggaaaacctttcttttgagctatttataactaacagcaattgaccaagtatacttttgtgagtgaaactgacctttctccctgtaagaattctccaaaatttggaaactatttgtgagtatttttacttatggcaatataattattggcacaagctcaatcagattcggttttctttcgtaacaggaaccattggagatactcattactctttgaaggcttacagtggaatgaattcaaatacgacttatttgaggaattgaagttgactttatggagctgataagaatcttcttggagaaaaaaagactgggtatattttcaatatgctttccttttaaggtccctcacctgtggaaagtaaagaatgtcactttctgacaggctcaggaacctcaagttatgtagggatctcaagaagatgggggaattcacccagttcatacaggtgaaattgctgttgcaaagattatgaatatgagagaagtccagcatggctgacttcatctcgtgtctggcctcaggctggctgcccttgctcactcttgggcataggccaagctagccatgggaggaatttagtttatagtttaactttgaagcacggatgataatagtctctccctaaaatgaaccccttccttgctcagggactgaaactacctttgtatgacaaatgaaagcccacaagattaagattatgagaggggcctgaattctgctaaaatgcaggtgtagctgactgataacaagtcattgtcccacagcttgcctttctataatctcttgcttctcaggagtcacatggccagaggtcctgagatttccagtcctgtgacccccacccagagatggacttagtgcatgaggaccattttccacacccctatgatttcatcctcaaacaatcagcagcaaccattccctagccccctgccttccaaattatccataaaaatcctagcctctgagttattagggagattgattaataatcccagtcctaccccttgggttgctctgatttaattaaaccttctctactgcaataccacggactcagtaaattggttttgtctgtgcaatgggcaagaagaacatgttgcatggttatacaggtactacaagcacagtctgatggcaaattattggttttgcttcctgcccttgatgtttctaaacatctagtccaaaattacttgtgaaaggtccagcaaagccaattttaaaagaggctatatggccaatcactattctttctacacattattgcaaataatcaggccacggctgggcacggtggctcatgcctgcaatcccagcactttgggaggctgaggcaggatcacctgaaatcaggagttcaagaccagcctaggcaacatgataaaaccctgtctctactaaaaatacaaaattagccaggcatggtggcatgcacctgtaatcccagctacttgggagactgagggaggagaatcacttgaacctgggaggcagagattgcagtgagctgagatcacaccactgcactccagcctgggcaatagagtgagactttgtctcaaataataataataataatcagaccaagtataatgaaattaaaatttattttgcaaataaattggtcctactacaatttatccttcatagaaatgtggaaactgaagataaaaaaaattaggtttcagaagaaaactatactacacctgttattagattctagccctaaacattgtttttgaggtttttattatttacctgcaatttggtctaaattctgaattatttcctgactacaagtatccaaggaataaatgggttttctttttctttatgatagttttagttggcttctaatgcaacaacaatttttattgtaatcctgtgtgcattctattcctactattcaaattattaatgttatagatctttcattgtagtacttctgaattaaccaaaatcacagtattctgaagatgattctacaaagcctgctgtttctacaaaggctgctgatgatttctacaaagcctgctgtagtgttgctgtggcctctgcttaaaaaagtagaaaacacattgatgcagcatgttcaccccaacctccctgcctaaaggctcagggaccatcttggaagaggaaggcgcgtgagattgtaagagccgaattagggggatggagtgtggagaataaggacacttcatcttggatgctcacctgccaaattgacttctgatgaaagccagctccagaaatgtgcctacagttactactttcacctaaaccctgcccttagtcaaatccttctcttcttctaagcaatcaacttcaattccttgtataacccacagtataaaagggcttttataccattctatcctattgcatgtaagccttgggtctgggaggtaacagtgtgggattccaccatctcatctccctgccacccaaacatgcctgctcttctttaagcaatattaaatgtttgtacttcagaaatttgatttgtcagcctcttcttcagactctcagcttctttggcctttgggagtaaatttgcataggcctgctcaaaacaggatgttctgggggtttgggggtgttgttttgttttgttttttgttttgtttagagacagggtctcactctgtcacccaggttggagtgcagtggtgcaatcatggcacactgcagcctcaaactcctaggctcaagcaatccccccaccttggcctcccaaagttctgggattacaagcataagccaccatgcccagccctggacttttctttaaagacatttacacagtgtaggaattactgtgggtgcactgctcaggtccccttctccaggatgctcattcctacctcatagatgattttcctgcagagatttgacctcagctgaagggcagtcacctggtccaggtggttgctattcacctccttcctgagaacagccaacagccagggacacgctagcacagagatataagagcgaccaaggtgaggccccttctgtgctgcggtgcatgctccagagcctccctgggatcagacttaagagggtctccagccagatctggtcttcgctgctttcctcgagctccccagcgcactcctgcaatgcatcttttttttttttttttttttttttgagacggagtttcactcttgttgcccaggctggaatgcaatggcgcaatctcagctcaccacaacctctgcctcgcgggttcaagtgattctccttcctcagcctcccaagtacctgggattacaggcatgcaccaccacgcccagctaattttgtatttttagtagaaacgggtttctccatgttggtcaggctggtttcgaactcctgacctcagttgatcctcctgcctcagccttccaaagtgctgggattacaggtgtgagccactgtgcctggcccaatgcacctcttgaatcacctcctcatgctttgcttttagagaacatgatccccaacatgtgattccagcaaagattctagaaagccaaccgtgacaatcacttctgggtttagatgacccccccccaccacaagatggcagtgagcacctcatcacagaggtgctgatggtctgcagcaccgcgccaggccagaacgtgccttttacagaagaaaataacccagtagctgactaggatggtgaggagggctggtgagcactgcggtagtgagagggacactagcatcactgagatgcaagtgatggtcatttttcataggtcaaagctcaaagcaggggacagttacagggcagggcttcatagcaccagtgtgatgaaagtatctgggagtggctaaggccagcactatgccatgggaagcaaggtgggcctgaggaggaggcagcagcgtcagcctgcaacaagtgggggctgccctgcagagacctaagagtcatgttatagagcacagtgtctgtaaggccaagaagtgtggacagccaagtgtgtcaattactagacatactcaagaggagcaggaagggcagggcatggtggctcatgcctgtaatcccagctacttgggagactgaggaaggagaatcgcttgaacccgggaggtgaaaattgcaatgagccgagatttcgccactgcactccagcctgtgtgatgggagcgggactccatctcaaaacaaaaaaagaaaaaggaaaaagaaaaaaagaaaaacctaggtatacttctcaagcaaataaaaataatcaaaaccaatatcatgcccgggcacaaatttcatatatataacagatttaaatatatgagggtgattatcctctcatatctccatttttttttgtttttccatttttttctttactaaaaaaagttaatgccaatgacacacaatttttttttttttttttttttttgagatggagtctcacttcttcgccctggctggagtgcaatggcgtgatctcgactcactgcaaagtctgcctcctgggttcaagcaattctcctgcctcagcctcccaagtagctgggaccacaggagtgagccaccacacccagctaatttttgtatttttaatagagacggggtttcaccatattggccaggctggtctcaaactcctgatctcaaataatctgcccgcctcggcctcccaagattctgggattataggcgttgagccactgcgccccgcctatgtatgattttttttttaattttattttcataagtttttggggaacaggtggtattttgttacatgagtaatttctttagttgtgatttgtgagattttggttcacccatcaactgagaagtatacactgaacccaatttgtggtcttttatccctcacccccttcccaccctttcccccggagtccctgaagtccattgtatcattcttatgcctttgcatcttcatagcttagctcttgaacccttactttctgtttgagggagaagacatatcatctacaagtagatactgtgtaaacattccattgcatgactatcccataacttatttattatttgtgtttggttatttgctgctatgtaacaaccccactcccaactaaatggtgtgacaattccatgattctgtggatcaaaaattctgaaaagtcaaacccaaggagttttgtctctgctccatgatgctaaagcctccgcaggggtgaggcgaatggctcagggtgactgaaaagctcagggttggaacagctggggatgaggcctctatgtataagatgattcttcactcacaggtctgaaactatggtggggacagccagaaggctcggctcagctgggacagtcacctgagccctacacatgacctctccaacatggtgatcctgaagcagttgggtttcttacacagcatcacacttttcttttttttttttttttttgagatgaaatattgctctatcacccaggctggagtgcagtggcacgatctcagctcactgcagcctccgcctaccaggttcaagcgattctcctgctccagcctcccaagttgctgggattgcaggcgcctgccaccaagcccagctaatttttgtatttttagtagagacggggtttcaccttgttggccaggctagtcttgacctcttgacctcaggcgatccgcctgcctcggcctcccaaagtgctgggattacaggcatgagccaccgcgcccggccaaagctcacacttcttatgattcagccttagatgtcacatcagttcattttccccacacttattagtgttagaagtcacaagcccacccatactcaggggactggcacacagaccccactctcaatggaaggggtgggacaccaccattcctgctgatgggcatttgggtaacttcctgtttgaagctattaagattgggctgctgtggccgggcgcagtggctcacgcctctaatcccagcactttgggaggccgaggcgggcggatcacgaagtcaggagatcgagaccatcctggctaacacggtgaaaccccgtctttactaaaaataccaaaaaaaaaaaaaattagctgggcatggtagcgggcgcctgtagtcccagctactcgggaggctgaggcaggagaacggcgtgaacccgggaggcggagcttgcagtgagccgagattgtgccactgcactccagcctaggcgacagagcaagactccgtctccaaaaaaaaaaaaaaagattgggctgctgtgactattctagtaggtgtctttggtgagcgcctacacgtgtttctctttttctctttagtatatgcccaggaggggaactgctggctcccagataccgtatgttcagggtcacacacacttccacagggttttccaaagcccttgtaccagcacgcactcccagcacctgtgtgactgctccagctgtcccacagtctcatcagttctattgctgatattttcattttagcttaagttatatttaataggaaaattaccgttgcctctgccccccgttcctgcctgtaggagtttctcgtagctgttgctacaggtggccacaaatctgtcacttaaacccacacaaattgatgtccttatggctttggagtcagaagtgtcaactgaaggtactagcagggctgtactgacctggtggcctcagggagcatctgtgctgcttctccaccttctagaggctgctgcatccctcgctccagccccttcctgacaccactcaccctcctacttctgttatcacatcctcaccttctctgtgttcagggctccctctgtctctctcttgcaagcacacttgggattccattgagggccacccacataacccaggagaatttctccacctcaatatccttaacaactgcagagcccttttgccataaaagttaccattcacgggttccagggattgtgacatgggtagctttaggagtgattattcctgcctgtctcccgctcaccagaacttggactttctctctcaacaggagccccctgtgtgggaatagcctgtctcaacgacgccctctataaggacctgcttcctcaaaggacctcatagtcgggtcctgcccctcagtgtccagtctgccttggctggaggggctgcaggggtgtgttggcgccacctggtggagacagggcatcacagcaggtgggagcccagtagaagcacaaccaaaacatgggtaatgtttaaaattttctggctaagcgctgtggctcacgcctgtaattccagcactttgggaggccgaggtgggtggatcacatgaggacgggagtttgagaccagcctggccaacatggtgaaacatcccctctactaaaaaatacagaaaaattagctggacatgtggcgcgctcctgtaatcccagctactcgagaggctgagacacgagaatcgcttcaaccccggaggggttgccgagatcgcgccactgcactccaggctgggcgatagagcgagactctgtctcaaaaaaaaaaaaagaagaggggaggcgaggggaggggaggggaaaagggggaatttgtttggagctgagacatccatcttctcctgacctcagatatttgcactcctggttatgaagccttcacacttggactgaatacaccaccagctttcccgatttccagcgtgcaaatggcagatcgtgagacttctcagcttccataattacatgagccaatttatatatataaattgggtcctccagaaaaacagaataaattatatatataattatacgcataacttaattaaattatacgtataacttagctatatatataatttattctgtttttctgaagaaccctactgacacaaatgttgagcatcttttcatgtgcttattggcttaataacttgtacatcttctttggggaaatgtctattcaagttctttgcccattttgtaactgaactattaatatttgtctttacattgttgagttgtaaaagttccttatatattctagatactagagccttatcagatatatttctgcaactattttctcctaatatataggttgtgtttttattttctttttctttttttttttattgagacagtctcactctgtcacccaggctggagtgcagtggcatgatcttggctcactgcagactcgacctgccaggctcaagcaattctcccacttcagcctcctgagtagctgaggttataggcacttgccatcgcacccagctaatttttgtattttttagtagagccgaggtttcgccatgttgcctaggttggtcttgaactccctgcctcaaagcgatctgtcagcctcagtctccctaagtgctggaagtacaggtgtgagccacagtgcccggccatctattttcaatagtgttttttgatgtacacaggtttggaattttgataatgttcaattcatccatttttttttttttttttttggttctttctactggaccaccactcttgagccctctaatccaacctccacgcggcagccagagggagctctctaaatgtaattactctttccctgctccacctgctcaaaacagtgtcacatttgtgatttaaaacagtatttctcaaacctaatttgcaaacaaagcaggtggaactcttcttgtatgcacagcatctgatttggttggtctggcatgggtctgggagtgagcacacctaccaagcggctgctggggtaacttgcgttttccactgatgatttcagcaatgtttccggtcccacatgctcctccagaaccttgtactcccccatgaaaaggtggagtccatttccccttcctttatttatttttttgagacgaagtttcactcttgttgcccaggctggagcgcaatggcgtgatctcagctcaccgcaacctccgcctcctgggttcaagcaatgcttctacctcagcctcccgagtagctgggattacaggtatgtgccaccacgcccagctaattttgtatttttagtagagacggggtttctccatgtcggccaggctggtctcaaactcccgacctcaggtgatccgcccgcctcagcctcccaaagtgctgggattacaggcgggagccaccgcgcccggctatttccccttcctttgaacctgatcaggacttgacgatggcatcaacatggtgagagtgaccctgcatggcttatgaggctgggttacacaaggcgatgttgcttctgactggctccctctcaggatacatgcccttggaacccatcctctaagctccttgggagcccaacttagcccatgtggagacaagacagggagagaaacagaggcacccccagccctcagccagcatcaaccgccagacaggagagcaaatgcgccaacaatgattccagctgaagcctcagacagcgtggagcagagatgagggatccctgcagattgcagatgcgtgagcaaaatgcatgctgtcactgttttgaaacaacaatgtctgggggctgtttgttatgcagcaatagacagctgtaacaatgctgttactgctgtattccatgaatgactgcactttgagtagcagggggctagatcactagataagccccatggcttctgtgtatgctatttttctacttttatatccttttcattcactttttttttttttttttttgagacagagtctcactctgttgcccaggtgggagtgcagtggtgcaatcttggcggactgcaacctccacttcccgggttcaagcaattattgtgcctcagcctcctgagtagctgcgactatagatgcacccccatgcctggctagtttccgtatttttagtagagacggggttttgccatgttggccaggctgatctcagactcctgacctcaggtgatccacccaccttggcctcccaaagtgctgggattacaggcgtgaaccactgcacccagcctcattcactttctttacttggctcatttttccttgttgcctcaattctcctctaagatcactttcctgacatttcagcctgggcctgttgccttctctgggtcccctccgcctcctgtgcctcccccatctcagccttgatccctcagattatacttcctctgtccccaccctgaccatcttggctgtccctggatagggatgggtatcttctcccactggtctgggagatctggaaggacaggcctggaaaagacttggtcactgctggaaggagctcagttagtgtggtgctgaggacagtacgggtgaggctggccccttcacccaaactcccactctcttccatagatttcacctctgtggcccaggccataggattagggcaactccccttaaacatcgagtccatcctccaagctgtccttttttttttttttttttttttttttgagacagagtctcgctctgttgcccaggctggagtgcagtggcgcgatctcggctcactgcaagctccacctccagggttcactccattctcctgcctcagcctcccgagtagctgggactacaggagcctgccaccacacccggctaattttttgtatttttagttgagacggggtttcaccgtgttagtcaggatggtctcgatctcctgacctcgtgatccgcccgcctcggcctcccaaagtgctgggattacaggcgtgagccatcgcgcccggcctcatgctgttcttgaatagtgagcacctgttacaagtcgccccaccagcctctcacttgtacccccctcatctctttctccccaagagacagaggaccctggcacttgtgaagcatgacccagaccctggggccatggcatccaacatcctcattccccatgacccctactgtctagatgtagctgccaagagacccccagactccccgggcctctgtctagagtgccaagacagagagagaatgccctgccgcttgcatgctttgtggggtgtccttcccccttccctggctgctaggcgtgacttcaacgttctccccaacccccaaacagcagcactgacaccagctgcagacctggctcaggttagctaatgaggaccaggctggggatggagcctgaacccctaaaccccagtcctgtaccccaccctaatcctggggtctccactggacaaaacgaagcagcttggtttttcgttgttattgtttttgagatagagtatctctctgtctcccaggttggagtgcagtggcgtgatctcagctcactgcagcctccgcctcccgggttcaagtgattcttgtgccgcagcctccccagtagctgggattacaggcgcgtgccaccacacccagctaatttttgtatttttagtagagacagggtttcaccatgttggccaggctggtctgaaactcctgacctcaagtgatttcccagcctcggcctcccaaagtggaagcggcttatttttaaggagaaaactcccgtggaaaggaatcagcacctcctctgtcaacatttcacttctctgaaaagactctcacttccaacagaaagtgctttgtaacacaacaatgaggctgggcgaggtggctcatgcctgtaatcccagcactttgggaagctgaggcgagtggatcacgaggtcagaagttcgagaccagcctgaccaatatggtgaaaccccgtctctactaaaaatacaaaaattagttccgtgtggtggcgtgagcctgtaatcccagctactcaggaggctgaggcaggagaatggcttgaacccaggagatggaggttgcaatgagccgagatcacgccactgcactccagcctgggcaacagagtgagactccgtctcaaaaaaaaaaaaaaaagaatgagaacatatggacacagggaggggaacaatacacacaaacaaaatttagaaacaggtgaaaataattttagtaatatttttactaatactgatatgctcaaaatattattatttcaataagtaatctaaaaattattgagatgtcttatgttcttttcatcatactaagcctttaatatttggtgtgtattttacactcacagcacatctcaatttgcagtccccatgtttcaagcactaaataaccatgtgtgtccggtggctaccatactggacagcgttgatctgaaatcgcatctgtatgcatcaccagcatatttgcagagatccccatctcagcagcacacctgaggctcatctgcgaaagcacctgcaacttctctacaacctcccacatcacctccaaacacatcctcatgtcatctgcaaacacacccatagctcacaggccaatgcctaaatatcattgcaggcaccttcagagaaagcacttactaaaggggtatacttgattccacatctgctttgacctgcaaatctcccttctcctttacatacatttgcatctcatttgtatgtcaatctaaatccactggcagagcctcagatcatcatctcaaagtcaggtggatgtggggctgggcaggcctccaggtgttcctcctcctgcttcctctggggctcttgatcctcctcctcttccttgctgctctcctcctcctcctccaatatggtgaccagttcctcccgcagcgcccccatctccagccccaggctgcacagctgtcccagcagctggacatccactcggcgcaggttcccctgccagtaggaaggggacgtcacagggatgccaccccagagagcaaggggtctctccaggacctgggtgagagcaggtcccaactcatgtcctggccacagcgcctgggcagggtcctcactgtgcccatggaccctaactgccttcctgcttctcagagtgtctcttgatctctaactcttctctttgtctctccatttcattgtccctgacttctctctctctgtctcctccctctcttatctatatctgtccctgtttccctttgtctctgtccccatttattttttgtctttccatgcccctgtctctctgtctttatgtgttgccatttctctgcccctgcctttggctctctttctctcgcttgccctctctctgccctccccaactttctcaaattcagtctgtctctccatctctgttcctgctctccgtctctgcttcccacctctgtccctctcttttgggatctccctgtccccacctctgttcccgtccctcactctatgtctgtctctcggtgtctgtacatgcctctcatgtctctgcttctatctctcagattctgtttttcgatctctggccttctctatttttgttcatttccattcattctcatttcctctctttctctttcccttccaaacccctcactcaccagctcctccctgatccacagcagactatcgcaggcacctccagtgtctgcccctgcagtcctgagggtctgaccagggatttccactggggagacctccctcagggcctgggggggtgggcccagccccggaggcaccagtccagcctgattcagctgcctccacagttccatcgtctctgagctatggctgcaaggagcaggaagtagcaaggtccagggtggcctggtcccctggggagctgtgtgcgtggtggagagtaaagggcagagggagtgggatgggggttcctgggaaaggtatcccaaagtccactcttcagagagaatcagctggccttgtgcttttctttttccttctgaagtctaacctcaactctgctcacagggttcaaacatagcctcttgcagaggtctaactccacccttccctgcctgtctcaggcctgacccctcaggggcgctcagtgtctgtagatgcctggcaccctctgtccttccacctgccccccaccaccacttctccagcctctcctcagcctccatttgacctctggcttgcccatagcttggtccttgcttgtcctcttggcacgggtcatcctagggctttcccaccagtgtgcctttgggggcaggaatggctcccaggggcaccaagacagcaatcccttagctggagtgcctgtgtccaggctgctggcctagggccaagcagccaattctgctgaccctggacttgcctatgggtatattatccctgttgagggtgagggcttctgctgtggaaaagtctgggaagcactgcaggcctctctcggccttggacccttccttcagacccaaggtgcatatatatacatatatataatggtagatcacgaggtcaggagatcaagaccatcctggccacatggtgaaaccccgtctctagtaaaacacaaaaaattagccgggcatgctgccgcgtgcctgtagtcccagctactcgggaggctgaggcaggagaatggtgtgaacccaggaggtggaggttgcagtaagccaagatcacgccactgcattccagcctggcgacagagcaagactccatcttaaaataaacaaatgaacaatatatatatatatgtattttgttttttgagacagagtctcgctctgtcatccaggctggactgcagtggtgcaatcttggctcactgcaacctccgcctcccgggttcaagcgattcccctgcctcagcctcctgaacagctggggttacaggtgcacgccaccacacctggcgaatttttgtatgtttagtggagacggggtttcaccatgttagccaggctggtctcaaacccctgacctcaggtgatctgcccacctcggcctcccaaagtgctgggattacaggcgtgagccaacgcgcccagccccaagtcccttttaccatagaaagtaacatagtcacagtgcccagggattcacaggtatggggagagggttcgttattcagctgccacacccaccttcctaaacctgctgcccttccagtttcctcacgtgcacagccacgcccgtctgcttttagtttctcaatctgttggcttaaccttcaaaacaggcccaggatttgagcacttctcaccattccctctgccccatccccattcatctcttgcctagactgctacagcagcctcttttactggtcccctgcatccacccttgccctctaaggcaagggtccccagtccctgggccaaggaccagtaccagcccctcgcctgctaggaactgggccgcacagcaagagatgagcagcgggtaagtgagcattaccgcctgagctccgcctcctgtcacatcagcagtggcattagattctcataggaggcaaaccctattgtgaactgtgcgtgcgggggatctaggttgcctgctccttatgagaatctaatgcctgatgatctcaggtggaacagtttcatcccaaaaccatccccaccccacccccgacccccagtctatggaaaaattgtcctccacgaaaccagtccctggtaacaaaacggttagggaccgctgctctaaggtacattctccacctggcagaaataatctttacaaaatgtaaatccgattttgacactcccttcttcccactgtgaatagaataaaaccctaccaggcctgcaccgtcagcccctgcccacctctcaacccagtctcctatctctgtctgcaagctggttcccacctcaaggcctctctgctctagaggctacctctccctgcagcgcttttcccctagatctttgaatggctctttccttatcattcacttctacttcaatgtcacctcttcagagaggcctttgctgatggccctacacccagtcacttttttttatctgcttctcatcaaaattgccttgctgattcctttgtttcttattcatcctctcccacatccatcctctcccagcccagaatgttgacttcctgagagagggactgggtctgtcctgctcaccatggtaacctcggcatctagaacagtgcctgccatcacgtggtaggtgctcagtaaatattcttggaactaatgaatgaataattctatccacaagacttcacaatggctcttcatgctgcgatctagctttcaactccaaactggtcttgagatctcacctcagtctctaaccttgacatctaacctcttcacccactctcttacctgaccctaatttttaaaaatgacgtggtcagcttttcagccccctcattccctgtttttaggaggtagtgagtggaagctggaagaataagaaagcttggggagactgcaattgcagtcaggaaagaaaggtactctgccgggaagaacaccccatcttctcctagggaaagattgtggagtcctggggtttgttttgtttttcaattttttgttttaagagacagcgtctcgctctgtcacccaggctggagtgcagtggcgcaatcacagctcactgcaacttcgacctccccggctcaagtgatccccccgcctcagcctcgtgagtagctgggaccacaggcgtgcaccaccacgcccggctaacattttattttttgtggatataaggttgccctatttctttgtggagataaaggctcccctatgttgcccaggctggtctcgaactcctggcttcaagcgatgctttcgcctcggcctccacaaagtgctgggttcacaggtgcgtgagcccgacctgtgtctcgttttgaagctcagggagagggcgctgtgagcaatccctaaaccctttaagagtaaaaagtgcgtgcacctttaagaggacggttagaaaacgcggggcgtggccacaggagaataagttcgcgctgaaccaggagcgtgggataagaccggccccttccggttacgaaaccttagcaagatggcggctccctgggcgtccctgcgcctggtcgcccccatgtggaatgggcgtatcaggggcatccatcgcctgggtgcggcagtggccccagagggcaatcagaagaagaaaaggacaatactccagttcctgaccaactatttctacgatgtggaggctctgagggattacttgctccaaagggagatgtacaaggtgcatgagaaaaatcggtttcgagacaaggagtggatcaggccagataagtatggccatttctctcaggagttctggaatttctgtgaagtgcctgtcgaagctgtggatgccggtgactgtgacatcaactacgagggcctggataacctccgaacctccgcaggctggacatctcggacctccctgccgtgtccaaccctggcctcactcagatattggtggaggagatgctgcccaattgcgaggttgtgggagtcgactgggctgagggcctgaagtcagggccggaggagcagcctcgggacacagccagccctgtccctgcctagcctttagccctgtccccactcacgtggcttctcagcgggctgcatggaatgtctggtagctcaccacacttctggcttccatttgtcttcactcaacgtcagggtgggggagtggtgctggccaatcacaggagagagcgtgagttcccagtatttattcctggctgcccttggctaaaggtcacagctcctgtcaccctgtcaggcagccctttccatgcccctgttcaggcctggggaggtaaaggctcaggctgttagtagccgcagagagccacactcaccttgtcaggagactcttctcaaactgtccttatgtgagtgcactgccatttcttgcagggaccctgactgacacaggggctactactgacactttacagggatggttctcccccgtgcagggccgctgtgcccactgcaggacatgcagcatccttcgccccactccactcactaaaggccagcgcaccccaggccccatagtattgctggttatggatttattgactttatgttccaaattcagctttttcagttggctgttttttgaaaggggataagctttgtcagtagagggcaccgaacaggcattataggaggaaaggcgcctccttcgtggttcttgttggttgtgcttctgcctctggacgccgcagtgcatgtggcttccccagcacccagctcctgaagcaccaggcggtcagcagctgcccttggcaccctccagccctcagaagttgcgtaggagacacagcgcctccactgaggcacctctctgggaataacgttccccagcaccccaaatggatttccagtcaattcagaagcattttaccagtgaagccctcattattccagttcactgttaaagccagtaattctctatattaaactttccctgttcggtttatggagtataaaccgaacagggtcttgggaagggacagtgtctaagtgtctgggtgccatccagagcatttggcaggggcagctgcaggatgagtgtgttcccaggggagtgagagcagcagctatatggcacttgtttgctactgccctctttttttctttttgccaaacctgaggtgactagtgtcacaggtggagcccatctcaca

SEQ ID NO: 735336 - DNA, 188177 bp, Homo sapiens
ctccaaggctgagggatgaggagacctgctgaggacccagggccttatctttccatcccactccataggtcccagtattgactgatgctgtcttcacctcctagcctcacttttaaccttctggcacccgcccaccactgtccagttcactattgaagccctgccgtccagtgctgcagagggaaaggatgttcttctactggcctgcaatatttcagaaactattcaagcctattattggcacaaggggaaaacggcagaagggagccctctcattgctggttatataacagacattcaagcaaatatcccaggggccgcatacagtggtcgagagacagtataccccaatggatccctgctgttccaaaacatcaccctggaggacgcaggatcctacaccctacgaaccataaatgccagttacgactctgaccaagcaactggccagctccacgtacaccgtgagtgattcccccatacctctgggtgctggcggtcagttctgcttcacacacatgagattgtcaggcctgggctgtgcctgcatccccctctgcattttgtcccgtgttgagatttgggcatttagtgcaggacacacacatggtaggtaaacttcaacagatcagaattcctttcctgcatccaggccctgcagacactgatggcgggggcgggggggcctcagcagggggaggtcagtctcagccaagcaccccatgccctccccatgaacctgaccctgagaaagaccctggagaactgggtcagggcctggcctgagggcgtcctgggaacctcacaaaagcccagcctcaggactcctgactccgtgtgaccccgggaagcctgtgtcagggctggggtgtggtctcctgggcagggcttactgggagcaaggatttaccagatgtctgcgggctgtggttcctgaagcttctcatcagtgagggctcagctcccagagtctcatctagacaaggacagagcctaccactttccctgggactcagcctggagagggcagggggacaggattactagggcattggccccctgaatgaggagcttaagagatgcccttgggcagtcagtggcccaggggtaggaacagaggggagaaaatgttcctggcagcttcttgtccaccggggatcatgcccaggggtgctctcccatggaggcaaataacagatgctgttgatgtgaacacctcctctgtgccaagcttcatgtcagatcctgtgaataatttaaagttcattcacagacaaagtggcaagcctcagaccattttccatttacatattgtatggaggggaaactgaggcacagagagatacagacaccggccacggtgggcagatcgcagctggcagagtcacatgagggctgtctgcagctgctgccacgtcctctccttcatccctggtgccttactaggtgtctgtggaccttagaacagccactggttcggatgttttcttcttaggtgtctacagctcggagggggagattctggtctggagagttatgagtaaatacagaattaatcagttttttcttaactaaatcacctgcctcaacaatcagtcagtgctggggaagttcaggcctcctcgctcaggtccacaccccgcatctctggacatgaaatggcttcgtgtgttttctgatgtgtgggtatcattccaacaggaggataaaggggaggactttgctttctctccccattcacaccctgcaccagccagggcccagtgtgagacacatactccgtagttctctcatgaaggagggagggaatgaatgaaggaatgatctataacctcttcagagacagagacctggatacaagatcctaggaggttctgggcccaacgtgagacacacactctgtagttctcttatgaaggagggagggattgaatgtaggaatgatctataacctcttcagagacagagatgtggatacaagatcctaggaggttctggccacacctgttttctgtccctctagagcctaagacccatgtctcattcatctggcccgtttctcctaaatctgcccctgggagctgagtctcatctgaccctggggctgcagggctgtgggaaggttttcaggggagggatcaggcttgcgggtagtcccacacgtttgccttacaccctggagctctacctggttctcactatgaatatcccataataatcccccctatcctttctggggagtagaaaaaaagtaaatatttaaaaatatgccagagcatctgttcttcttagcaagttcagatagttattagttagcaggaataaatcgttattttaccagagcctcacctgctgggggtttatgggagcctaactgactgaggggggtgggaaatatccaactccagccccctctagccatcatgtcccacctaaaggagagaaaaaactgagaggcacttgtgacattcacagcccagggcacagactctatccaggaccacagaacccctccctccccccactcaccaccgcatcactgaacgcctgctcacccaagttcctgttgcccagtacatcatgtcctggctttcaacaaaaactacaagacagactagaggcaaaaaaaaaaaaaaaaaaaatgcagttcgaaagacagaacaagcatcagaaccagatgcagatgtggcagggatgtggcagggatgttgaaattatcagaccaggaatttaaaacaactctggggccaggagcggtggctcatgcctgtaatcccagcatttgggaggccgaggcaggcagatcacctgaggtcaggagttcgataccagcctggccaacatggcaaaaccccgtctctactaaaaatacaaaaaattaggcaggcatggtggtgggtgcctgtaatcctagatactcggaaggctgaggcaggagaattgcttgaacctgtgaagcggaggttgcggtgagcctagattgtgccactgcactccagcctgggcaacagagcgagattccatctctaaaacaaacaaacaaaaaacaatactggctaatatgctaaaggctgcaatggaaagcatagacaatgtgcagaacagacggatgctgtgagcagagagatggacaggctaagaaagaataacaacagctactatatctatctatctatctatctatctatctatctatctatctatctatctatatatatgtatatatatgctagagatcaaactcactgtaacacctggatctcagagtggttgtgaggatgtttattaggagattaaagagattaaagcagagttatacacagggcgagagctcaactgatgctatcaactagtattcttatttttttgatgttgttattggcaataaaatcaggaacaatgcagtaaaaatttggttttatcatgtacgagttctgtgaccttccttgacttactgaggtactgtaagtctcagattctaactctgcagatggcggtgatgcccctctccctcaaggtgatgtgaggatgagatgagctgtaggtaggttggtgcccactgtgcctggcacatggaaggcccctgaaaatagtcaatgaacatcatccccgctcatcagcatggagttgacagtgagggctcgctctctgtgacaatcatggaatggaaaagaagaaacaagaggaagactgggcgcagtggctcatgcctgtaatcccagcactttgggaggccgaggcgggcagatcatctgaggtcaggagttcaagaccagcctggacaacatggcgaaatttcatctctactaaaaatataaaaattagcctggcatggtggcacaaacctgtaatcccagctacttgggaggctgaggcaagagaatcgcttgaacttgggagatggaggttgcagtgagccgagattgcgtcagtgcactccagtctgggtgacagagcaagactccatccaaaaaaaaaagaaaaagaaaaaagcaacagagggaagaggtgtgacatgagaggaagaagggatttaaaggtacaggagcagggcgaggtgcaagcacctgtgggagaatgtaggagttggtacatcccagtgtgtcaagtctgagacacagaaaatggtgcaaccgtggagagcaagggagtcagctatgaggacagcccaacagaccacactcaggctctggagcatttccttcctccctgactatgcccctgccctgcaatgccccttatggtttcccttggaacaaacttgggccttgtcccctttgccttcccctttctgcagaaaacaacgtcccaggccttcctgtgggggccgtcgctggcatcgtgactggggtcctggttggggtggctctggtggccgccctggtgtgttttctgcttctctccaggactggaaggtaccgcagcttttccccagcctcctcccacccctaggctgaccccagtcagggaggagggagaccccgccctgtattcagggccaggctttccgcatcctcccaaggaatccttccctctcattccatggctcctcccttgccagctgctgatcctaggctgcctcttcctttatgaatgtggcacagttaaggttgcacccctgagtgctgtcctagttccctaacacagcaaagccacagctgcctggagggaggaagggagggagggagggagggagataagacgggagtgctcagaacctggtaccttctgctgttcattgaatttacccacccagtgaggagggatttgcaggcttgagatccatggtgggggtcctgggcatggtcacgcagtggggagtggcaaagcctggacaggctgggtagggtcagcaccccatcgtgattgatgtccctgaggtgtgagatgggagaacctggacctcaggacctgctgtcctttatgtctcttgccaaggggtggagagagagaggacaaggccattgccccatttcagcatctccaggcctgaaaggagggtctggccatggcagggatactgagttctgggagaatatgatacatgctccttgcctccccatgcccccagctcccccagtgtcctgcacacacagccggccctgctttccctctggggccttgacccttcctctcaggcaaacgcaggtggtctgattccctccctgagtcctcagtccctttcctgggtccctgggtcaatgttctcctcacccggcatctgcctgggggggtccttcctctctggccaggacagacgtgactgcttaaggcctatcctcagctccccgtcctcggccgctcctaccacgaaactgatggagacaggaggccttcactccagtccttgaaaatggagtcccttccttgtcctttattctgcccctaaacctgtgatttctccctgcaccctcatgaataatcctgacctttcctagggccagcatccagcgtgacctcagggagcagccgcccccagcctccacccctggtgagtgtcccttcagcccaggtgtgggagcccctaggcctgccctacggtgtccactcctgccagtcaccccctgggggcctctgaccctttctttggggctgcaaggaggatgtcaggaaacatgacacaggggaccccgactgtcttgttcagactgatctgtgggctctgggtcgtgggtcacctcctcgacctcagctgctcaggtctcccctgggaagaggctccctctccctgattctctgggagctgaggacccctacactctcctgcaggaggggcccaggctctcctcccaccctgctgctcactcctgtctctgtccccaggccatggtccctctcacagatccaccttctcggtaagcctgttccctccccagcccttttctactggggtcccaacagtgcaggctcagggcagggggaccatcaaccccacagcacagcactgacccacctttccccagaacagtcaggtcaaagtgagtgcctccagccaggatccgggcctctctacagggccaggaccacccacgccatgtgctgacccctccccgggaccctctacacctgaggagaaccctggagtccagcaggtgcagaatggacactgggaccatcagtcagaggcccacattaacaagggtgcggggtgggcccagccaggacaggggtcagggtgttgtgtccacactgggaggctgagctcaggggcagagctggtcaatcctgaggggaaatgagtggaagtggaggcagggaagtaagtcctggccgatcagagacaggaaccttccaggctgggcttccgtgaccctccctccctgtcccctgacatctcctctctcccctgcccaggcccctctacccagccccagaacagccactcccatctatgaggtgagtgtgggccatggatgttctggtcccgcaggctccaggggacccaggatctgcccccaccagcacctggctgagctcagattcaggaaaatgcagtgaaaatgagaacaggtggtggtgagcagaggagggaggggcctgggaacagggaccccctgagcacagccaggttcagccccagagaagccctgggtgggcccagagcctgggagatgccagacactgttctgagaaggctacaggggttgaggcctcttctctgtttttacaggaattgctatactctgatgcaaacatttactgccagatcgaccacaaagcagatgtggtctcttaggttcctctgggagctgctcttgtgggttgatggagcgtccccaaagctcccagccctggggacggggaaggacatggagcctgagccagagaaccagctctgagtcctgaggagacacaggcctggggacagggagggatgggagtccctgctgaatatctggagaccctgacaggttgccctgggctctgggtgggccgggacaaaggcctctcatcaccacaggaagcgggggcttgcaaggaaagtgaatgggcctgtggcccacccggggtcaccaggaaaggatctgaataaagaggacccttcctctcattggctctttttctgctcacgggaacttagcagaaactcacctgaaactccgtgtccattctctcccgggtcacacagggaaaatatctccaccttgtctcaaccacagtctctcttccctgggaggcagaaataggggttgggagtcaggctggggtgggccctacacaggaaagggcaagattcacatgagccctgcccagccagccgagcgctcagctgtcctcacactaccccagggaccaaggccatgcacagccccagcctgggtccctctgtgaatgcatgtggggtctcaggagcacagaagatggggccatctgatgtccacaaaaggtgagcaatgcgggagcaaccatgggtggtataggttgcggctgtggcccctacgcagcctccagtgtcctgacccctgctgccctcttcacccaggccctggaggcccagtctatcactgtcctccacaaatgaacttacctgtccccaaatccaggatcctgtgtgcttatacctggccactaggttctcctctgtcccagtggctactgctcaggacatctttatccctggtggggcacagagaggggctgtcagagcaaccaagattaatacagacgcataattcagtccttgagcactacccaggactctggcccctcattgctcatcagttcccactttaccccctggcatggatctcactgagcaagccaactctttacacaggagcatccaggtcagaggtgcaggactcccccatctaaagctcatgcaggctcccatggcgatgggacaacctgtctgctcctctccctggcccacagccctatctcgcctgcagctcctccacacacctgggacagcagttctcagcccttccctgagggcccctggaagggtgatgatctcatataggttcacttgaaccaggtgccaccttcccacaagtgagctggtgcctgcactaaagcacagagccacagttcccaagagtgttctgccactgccacaggtcccaagagtgttctgccactgccacaggttgttcgtcctgagatgagaggtaagaaaacaacccgcaatgggttgttttatatcgggatttgcatcaggatttagctctaaatgacccctgatcccacctgcacacagcgtcagatgagacaaggtgaggcctctttagttttctgttgaggctgtgacaaattaccacaagcttagtgacatagaaacctgaaccaaagtgcccacatggctgtgttctttctagaggctccagggaagagtgcatttcctctccttttccacctcctagaggcctcctgcaaccttggctgtgtcctctttctccatcttcaaagccagcagcacagcatcttgaaactattctgtgccctgcttccatccccacatctccacctcctcccacctccctctctcacttaaaaggaaggagccttgtggttattttggacgcacctgggataaaccacaacaacctccccatctcatgatccttcctttaatctgtaaagtgtcctttaccacgtgacatgtccacagatctggggatgaggatgtacacatctttgagaggcccttgttctgtccatcactcctctcaaggccatcttctcatcatcgttcactacaaactacacatgggcacctggatgggttcatcatgactgtggcgtcagttcctgcattaacatccccagcaccctccagatcctgagagagggagacggagggctctccatgcccctagtacctctccaccttcttcttggtgacatgcttagttgctaagaataacagaaagcggaggtgactgaaagatcacaactcaccggcccttcaatagttcgtggacatcagcaccacggacagtgactcagtgaggctaatttccaggtggcagcagggagcatgcagataggagggaactgcaggaaaagctgcccattctattctatatgagaaagagtgtaagaaagaggaagctattacagggataatgctattcttctctaatccataaattgcgaaacctttgcatgtctggatatcatggtttttagcacatctgctgccactccctgcagggctgattgctgcatccaggatgtggtctcttggggggctcacagcctgctttggcctcatggtgagtctccctgcccctgacactcaggccactgtctctgcctacaacatggtgggaaccttccatgattaacgtctgattctctgtgcctgacctttgaagcacatccatcactcagcctggagcatccgctgagctcagcatcctgctcctccatccccagctgagcccttgaggagatgcttgagaggatctcctgggctcctctgtgagctcctccaggctgagccttgtgcttggtgtcagaggcctttgccatctgcttgttctttccataggcaaataatcctcctcagggacaagtggggcctgaagatctgtctgaatatctatctatctatctatctatctatctatctatctatctatctatcatctatctatatgtatgtatatatgagaatgctttattaggcaaaactgcatactatgaacatgctttaaaatgcaacaggatgagatgtgaagacataaagaacaagtgtgtagtgacacatggctatcagaacacactgaagaatccacaccgcggccgagagcagtggctcacgcctgtagtcccagcacttttggaggctgaggcaggcagatcacttgaggacaggtgttcgagaccagcctgaccaacatggtgaaaccccatctctactaaaaatacaaaaaatttagccgggcctggtggctcatgcctgtagtcctggctgttcgggaggctgaggcaggagaattgcctgaacctgggagacacaagttgcagtgagctgagatcgcaccactgcactccagcctgggagatagagtgaggctccatctaaaaacaaaacaaaacaaaaagaatccacactgcttccccgcttcactttacccagaaaaggaatgttctaggccacttcctcttcagcacacatccccagggaactaaaataggttcacagtcacccccatcttcctcattcccatcacctcttacccacagaggcatctctggtcctacagatccagccctgccttcaagaggcacaggtccaacccatccagtgtccctgctagtcacacacagcactcagggtacaatggagggcttctgtgctttggatgggaacaaaccccacctcacattcccacacctgagaagccaccagggtcctctctgtcctgtcctcacactcaatgtctgtcctgggtcacccttgtcatctctcctggaaataggcatggctcctgacaggtaggattgaggctttgtcttttcaggagtccctcccactctgagcacatgaaactgctcagctccatgcaaccctctctcaccaggggccttgttctctgggtccctgaatacctgggtccatgccatgtacattttaagaaaaatgacagtgactctcaccctgacatcctcacccaaggcacgtgtctgacaagaatcaccaggtgagatacctgtggctccacacacctgaggcttcactgcgcaggggtgtcctcatccctctcctcccacccctagggacagtaagcaccacaggctgccttggaccaccagctccccctcccagacacagcctcagatctatactgacatgctacatggagaggctctgatgaacagcaggtattaggaaatcccaccgaaccaggtgccacttgcggccccactcctcctcatatctgtgactgggacagacacacataacacacctctgttcaccgcccagcccccaaggtcaatcacagtctgcttctcccctagatccactgctccccatgtcttccgtcctcagctgcatcctgggtggcctccttgctgttcttgtaccccagaggcaggttccaacctttgtgatgttgcctgcaatgcccaaactttcccttccccttccccttcccttttcccctcccccttcccctccccttcccctccccacccctatcccttcgtcttcccttgtcttcccttcccttccctataaagccaaacatacccatccacctaccttgtggtcaaagtcatcagcctcctgctccactcagtgttctctgaccctgcatatggaggtggtggcccctcctagaacacccaccactcactgtcagccttgcgtggtaatcacagattttgcaggggttacctgtgttcaggtgtgtcacctgtggaaccagaactcttggaaggactggcagagggagctgcttaggatatctcagggctcctggcatctggtctaccacagggctattaacaacagcacttagggacaaggtggaggatggacggttaagagggtaaatatggatgatgtgtgggcaaagaataggacacaggaacacatgcagtactcaaataattatgccaagaaaggtgaggacatggagatggacattcccatatacttctgatgggactgcagtttagtccctacagcaacattgacctcatcatgtttaacgcgcacacgctctgaccactatcctacttctgaaggcctccctgtgctgtgagctctgagaaggccaagcttgcctgttctgtctctgctaaagccagagaccagccaatagcccagcacagggtacttcataaatacatgttgaaggaatgagctccaggaacagtactccacatggtagagatgtgtgtatgaggatgttcactgcagaaggtcatgtcaatgtgacaagtgacgagcagcctcaaatccagcaacaggggtgtgggtaaaagatcatagtgtagccatgcaatggaaccaatgaaaaaaccacaattagagcaaatccacatgtattaataaaggaggtgccctccatacatgctgcacctaacagaatgttgccaaataagaatgaaaaatgatgatatttgggctgtaaaaactagaagtcagctaaataagaatgcatcgaaagtatttgtgaatgcttacaattttataatgccttggcatccgttttggatggaagttggactttctcataccagaagcagggctcagtcacctttgaaatagtttccagttctccacctccttccagttcctcagtgtgattgatcagatatctgatttatacaactgcctcctggtgacctcctccctatgggacttccggatacagcccgtatgactgccccactgaccccacaccctgcctgctgcagtgaccacctctaattacctggatctcatgtctgcttgcattaaatccaccaattaaaactccctgaggacaatctgtttgaataatattctgtaccctaataaaggccttgacccatgggttccccctctgtcctccccatactgcccctgacctctgtgtgtgtgtgtgggtgtgggtgtatgtgtgtgtgtgtgtgtgtgtcctccagacagggcctgtatcccccaggacctgtaagtaataaatctttattttcatcttatgtctctcgcaatcattggcaagagctctgcatcttaaagatcgcaaatttaagaaattggtgtagtcggcacaatagagtacctcttctgtttagcacaagatatctcggagctgctgaggcttttaacatcctcgccggtgtggctgcctcactggtgaggccgttctgttcagtgcaattcagttgctccactgtgtgctgctgtgttgctgctgtagagtgctgccatgttgttctccccaaattgttaccgagtaggaacctgtaatgtgctcccaaggtggtctaccccatgagaagggggattctccatctagggcaagggctaggtgtgtttctggaatcctaatagggaaggcatccacagagggtgaactccactcctccttagagtgaggagtgacatttcccatttattttccccatggaggtgccatgtattgactttttctttcactgtcccaaggttgagccaaggtgagctatggagaccagggcaagataccatttctgttagcaaagcaaatgggtgacaacgtgtggagaagctgtggttctcctgatggatatagcagagtgccatttagtaaaatcttgtcaggaggctgcccctggttagaccggcagtgtctgtagtcactaaggtggatgcgaattttaggccctgggccatggataatccctgcagacacagccgtggcttcatgtgatggggcaatcccgggctagtggctcccttgtttctgcatttcttgctgtggttgcacaatcaacacctcaggggttgattgggtcaccttggaaagagaaacagctgcctaggaggctggtgcacatggaggccaccctcaattttattctgctaacaagttgtaagattaaaacaacagggggctttgggtaccatcaggaacttgtcaagtaaacatccaaagacagaaagaagaaaaagaaaaagacattaaccgtctagaaatacaagccattttaaagattttgcttaaaagatgcgcttgggctgggagcggtggctcacacctgtaatcccagcactttgggaggccaaggtgggtggatcgactgaggtcaggagttcaagaccagcctgaccaacatggtgaaacctcgcctctactaaaaatacaaaaaattagcagggcatggtggcaggtgcctgtaatcccagctacttgggtggagaatcgcttgaacccgggaggcagagacggcagtgagccaagatcgcaccactgtactccagtctgggcgacagagtgagacttcatctcaaaaaaaaaaaaaaaaaaaaaaaaaagacgggcttgtttcgtcgttgtggagtcatcccagagagaggctactccctagagtcactgaccacctttcctcctccatcttttcctcttatcattctagagacagaaaacaagaatctcagctttaggtggctaacctcaccccccaagaaaagaaactaccactttgattgactacaaatccaagaaaaataaaagagaaactttaaaaagtactgagcaaaccacaggtctagcaaacataatgctagccctaggttacttattcatttacaacaaacccctagatataggaggaaaaaataaaaggtaattaaatatatacacatacaatattttaatataaatatataataaatagttaaattatgtatgtataatatgtaactaaatcaaagtaaaatttcatactttgattctattggaaattcaaaattcatttattaacttatatattaaggaatttatgtaaaaaaagatttttaaaagggcaccaatttgcttttgtgtctctacaacataggatctaatttaactttacatttgctaaatacactaattgacaaatattcatggatttaatcaatactggggctcaaattgtagccacacgtgggaatcccataaatttaaacactctgtccctattatcttgagaagaaaactaaatataaaattgaaaaaaacaggtatgtctcaatttacctgtaactttgcctaaatttcccggagtcatatacccattgctgtaaaacattctctattggacataggtgctctgagacaataaataaaatagaagtgtttttggtacttagacattggcttgacaaaatgggatcccatgaaacctcagttaagatagtgaatacggcccaatgtgagttgaaatggggcctttaaggattaaaacttattacatgaaacctagtaagtaatggggtgattatccatactgcttctccatttcatagcccaattttgacagttgtcaaatctggaaaaaacaaacaaacaaacaaaaaaacccctgggaatctgttgcctcacagagacacaaagtagacatcaaaattgtatatctcagttccagttccaaaatggtggcatagaagcaagctggctttactccttcacacagaaaaccaaaaacaaatatacagcaccaaaattattaccagatatattccagaactcaaatatgaaaatgaaacagttttcagagccacagagaagtgaaaaaaactcccgacagatgacaaaagaatcagatttccccatctgtaatgtccctccctgccccattctgcctggtaccaggtgtgtggaaaattttaccccaactcatggtttctacactgggaaatgtaagatcaatgcgggcaaccagtttctgcacaatcctgggttccctgtccctgccttaacccacaagaagcattgtgagtgcccgaagggagaaatttccctgaggacagtcaaagagtggggaggcaggactaccatctccttccctggaaactctgctgtgtaactcagccaagggagacatgaaatcagactggtgtttcagcagctccatgttgtagtaggtttgtttcacaggtatcctgggcatggacatctagccagctttcccacactgccaggatatcccctttgggacctccctcagttaggaagggcacactctgatcatttactagggccaaggtaaaccctaaaggtaacttagagatgaaaaggaggtagtgacctagcagtaaagaactctaagaaaatctatccaataaaaatcaaaacaagccagacaaagactaaaataaataatgaatccttcaatgtaaagacctggacttacatccacaagaaacagtaagcaggtaaccatgatctccccacatggacaaagtgaggaacaagtgactgatcctgatgagatggtgatgtgtgagctctctaatcaagaattcaaaactgcagttttaaggaaactcaatgatcttcaagaaaacatggaaaagcagttcagaaatttatcagagaaatttaacgaagggattgaaataatttaaagaaaacaaacaggaatcttggaattgagaaatatatttgctgaacaggaaaatttattagagtctctcaacagcagaatggatcagaggaaagaatcaacccaaataagactcccccaaggcataaaataatcgaattctcaaaagtcaagggcaaagagaagattttaaaacagaaagagaaaagaagcaaatggcataaagaagctccaattctgtggcaacagattttcagtggaaatcatacagaccaggagggagtgacatgacattctcaaaatgctgaaaaaatattgacatttgagaatactttatccagtgaagttatccttcaatataaaggagagagaaagtttcctagacaaacaaaagctgagataattcacaccatcagactagtcttcctgtaaatactaaagggtaaatactaaatacttcaatgtgaaagtaaaaaaaaaaacactaacatgcaaaacaaccacaacaacaataacaacatttgaaggtataaaatccactggtgaaattaagtacgtagacaaacccagaatactcaaatagtaattgtggaaagtaatccaatcataactctagcatgagtctcaaaatataaatctatcaaaaacaataatacattttaggaggccaaggttggcagattccttgaggtcaagagttcaagaccagcctggtcaaaatggtgaaaccccatctctaccaaaaaatacaaaaatttgcagggtatggtagcacatgcctgtcgtttcagctatttgggaggctgaggcaggagaattgcttgaacccaggaggtggaggttgcagtgagctgagattgcactactgcactccagcctgggtgacagagggagactctgtcttaaaaaaaaatagctacctgtttggagaaaggtaatataaaatatgtaaatagagacaaagtcaaaatttgcaaaggatgaaattaaagagtagagtttttttggggggttttctgtttctattattttatttgtgatctaagataagttgttaccttttcttctcttgaagatactttgttatatctatgtttttggaagtcttatggtaactgcaacgcaaaaaatctatgatagatccactgaaaataaaaaacaatgacttaaaacatactaccagagacaatcaaccacaaggaagacagtaaaaaatgaagaaaggaagaggggagttacaaaacaaccagaaaacaggcaacaaagtggcagtagtaagttcttacttaaaaatattgaacactgaatataaatggactctattctccaattaaaaggcatagagtggctgaatgctgcctatatgctgcctacaagaaaccacttcatgtaaaaagatacaaatagactgaaagtgaagggggtggaaaaagatatttcatgcaagtggaaaccaaaagagagcaggagtagctatactgatatgagataaactacaaatcaaagactataaaaagagacaaagaaagtcactatgtaatgataaagcgctcagttcagcaagaggagatgccaattataaatatctatgcatccaacacttgagctcccaagtctcccaagtatttaaagcaaacaatagtggatctaaaaggagagatagactgaatacaatattaattaggggactttaacaccctgctctcagcaatggccagatctttcagacagaaaatcaacaaggaaacttcaaagttaaactacacactagatcaaataggcctaactggcatttacgggacatttcactaactatctaactgttacagaattcacattattttcatcagcacatagaacattcttcagaacagaccacatcttaagtcccaaaaccagtcagaataaattcaaaaaagtttatatcacatcaagcatttgttctgaccacaatggaataaaactacaataaatgaataactttctggacacatacaacctaccaagatggaagcatgaaaaggcagaaaaacccaacaaaccaacatgaaactgtaacaaaaggaaaacccaggaccgaatgacttcactgctgaattctaccaaacatttaataagaactaaaaccaattctactcaaaatgctttaaaaaattgaagaggatggaacactttcaaactcattctacaaggtcagcattatcctgataccaaaaccagacaaggacaggacaaaaacaaacaaacaaacaaacaaacaaacaaacaaaaaaacactacaggattgcttgaggccaggagtttgagatcagcctgggcaacatagtcagaaccaatctcttaaaaaaaaaaaaaaagaaaaaaattagccaggcatggtggcatgtgcctttagtcctagctactcgggaggctgaggtgagaggaccaattgagcccaggaggttgaggccgcagtgagccatgtttgtgtcactgtactccagcctggggaacagagcaagatgctctctcaaaaacaaaaagcaagctgggtgtggtggctcctgcctgtaatcacagcactttggaaggctgaggtgggagaactgcttaagcccaggagttcaagaccagtctggacaacatagggggactccatctctcaaaaacaaccaaccaaaacaaagccaaaaaagaacataggccaacatcactaacaaacatagatgtaaaagtcctcaataaaatattaacaaaccatgtttagaaacacatcaaaagagatcattcactatgattaagtgagattcatcccagggatgccagtatggctcaacatatgcaaatcaataaatgtgatccatcacattaaagagaaccaagaacaaaaaccatataatcactccagcaagtgcagaaaaggcatttaataaaagaatgggttgagggagtggagcccatagtcagagcagcagtggtctgggattttggaagtagaaagaagggcagcaccactggccaggaccaccagggaacacccccataggccctgggtgttgtgctccagggagggttccctctggagttattaatcttggtgtccactttgcccagctgcccctcacagggtcagggaggatgaagggaaagcttccttctaatgaaagttcagggactcacagttcctagagcctgtagggagaggaagatcttcgaggaagagcacctgggcattggggcgtttgagaggaagatctatgccaggtccaagtggacaacctgtggactctctctccagggacatacgggtatctgggaatctcctgtagcttaaagaggtaaagacctctccctttagcctgaggactggaggatgctggttcaggtgaatgagtcctgcaggggctggtacaggcctggagggtggtggtgtccagggccttgggttcacccttagcatgattcaggccgggcggtgtttcacatgagcaagagggcctgggttcattgcttcaggacaatggtgaaatctcatggtggaagaaatcttgtccttgccagtgcccagctttcatttggtcttggcccagagtgtcctccctagagaagactcttgtcccttcttcacactgcccttcagggatatgccagccttatgggataagatggggtggagactgtagatgtgggtgggaatctctccacagagtgctccttctctcagcggttgcaccttgtctcagggcttcagcttgaaatctgggatctccaagcccttccctccccagtcctggccaggaccacatgggcagatgcattgtgtgaagtgcatttcatttggggtgtcctctctgcatggcaccctcccgttgattctctttgcgcatgtcagagtgcaggcaccatccacacctcctgctggaggagggacggagctgttgactcctgagagctgatcatgtgttcccaccctcacacacaatcatggtccatcctctgagggacatgtgttgccaccactgtggagatggtgcaactgacagtaacaaacagtaaaatctggtactgaatgggaccttaagccaacaatgacaatgtcattccaaggtgtttcatttttattgattcaatgcaagtcacctgatttcattgactattcacaatagctcgataaagtaaatgcatcatcaccaccactttaaagaggaaaaaggtgcttgggcagtttgtgactactgtggtggctgctgcattgctctctggtaaagccaagtaggtggtgggtgcggcctctgggctgggatgatccaccctcctggtggtggcaggggagccaagctggagccatggcctgtgcagtggtagcagctgaactgaccgctgctgcaggatttgcaagctgttacattttgcgaagccatgaagcacataaaacctcaagtagaacaagtgtttcaaagtctaccaaaatctgccttcagagattattactacagaggtggatatgaacccaaaatgacaaaacgggaagcagcattaatactagataatgaatgaacactagtaatagtagggtaagccctactgccaataaagaaaaaaataagagatgctcattaacatgttatgctcttaaatcacgcagacaaaagagggtctccttatatagtagccacaatcaatgaagctaaagatttactgcaagatcaagctaaaaacagtaggtgtataatgaatttttaacttcatattagtttatgtatatgaatatcaagtttttataataaaatgcctccaaacaaagaatatttgatttagggtttaataacttctaagaggggactcagatgtttcctgtttcacagtcagtctgagagggtcatttttcctggagctgacctgggtggaggcctcacactgatactccccagcatcctctctcctgatggggtttatgctgagcatacagtggccctgggacagctccattctctccatgagtcacagacgctggtcatggaagatccactggataaggttccagagtcatctgtggggcaggtcaggatcacaacatccttttcttctgtgactctggtgttgctgactcagatggggtcggagccactgaccctgtggacaatcagtggaggtgctcaactgaaagtgggctgagggcacgtcttctcctccatccctgggtccttaaggtaactgtggaccccagaccaactgacacaggagctagaaagaaattatttaggaagttagtgagggtaagagcgtccttggcaaggtttcccctttaacaaaaagcagcccaagataattccttttctaacaaagagcagcctgaaaaattgagctacagatgtagatgagcaagatggaagcttgcacaggtgaattccagtaggtgtgccaatagaaaagggctgcctggaagccaggtatgttcaacatggagactccatcctcccttttctccattaccacatgtacagtaaaaaaccaggcaacatggcaccggccaggtagacaatccatctgcatgacaaaagatcagagtggggcagccagcaaatggcacagctggtctaaacaatctttcaccccctgtataaatcagacactgcctcctgaagctcatctataaaaccttctgcatttcactatggaagtggcaacccattttccccaggacccctctctctgtgcagagagctcttctctttctttcccctatgaaacttccactcttaacttcactctgggtgcctgcatcctagttttccatggccatgggacaatgaacctcgagtattaccccagatgaatgatgctgtttcacaatcactggttcagctcccttcttcttagggtttcacagctcggtggggagaataccacgcctcagtggtctggggagtgaggaacaaatgaagaattaatcagattttacttagaacgctatcacctgcctcaaccatcagatccatgttgggaatgtccaggcctcctctcttagatctatacccacttcactggacctgaaatcctgtgtttcccgatgtgttggtgtcactcctatgagaggataaaggagagaactttgctttctctccccactcacaccctgcacaagacagggcccaatatgagacacacactcgctcagtagttctctcatgaaggagggagggagtgacctcgagtgattctgccatctgtagtctgtgtaccctggccagtggctgtatcttcatatgcctcagtttcccctcagtaaaataggacacacaatgagaactaaaaataaaattctaattccccagtgaactgaaaggatggcctcttggccaagcggatcccagagttcctgatcatgacaggatgggaggttacacctcattacagcccctccctttggaagtttagaggtgacaactgactagcattaacgctaaaatcgagatcatgagactgacagaacagactctctgtggccataagataccaaattataaactcaacctaaggtcatgcaggcaagggctaagccacactttcctacatttaaagaataagctatgttctaacacagaattttctttctctctagcggctaaagtaacactagccttcgagataagcaatattgaaatgatcgcggctcatccaccaacactggctaactgacccctgttccaacagccacaactacacttcaattggacaggagactgatttcagtaactttctcctaataagagaccactgagcatggcctggttctgctggtatacagacacggtgcactgagtaccataatgcttgtttcatcttttgatgtataagacctaatttaatacatttaaatctgaattctccaccccaaagtgaacatggggtgcatgtagcatgcatgtttgttgatcacgcatgtgcgtgtacttcctttgtgagtatccatagctccacctataacctgttgaatatgtatacctggccaactcattcagcataaatctatcttccacattcccctcccttgaagtgcctgctattggtctctgctggaggctgcatcttctaccctggggaatggccagcctgcaggctgtaaccctgtgtaagaaataacctggttgggtgcagtggctcacacctgtaatcccagtggtttgggaggttgaagtggtagaatagtttgagctcaggagccagagactagcctgggcagcatagcaagatcctgtctcttaaaaaaattttagggaggagagtgaggatcagaaaaaatacctattggctattatgcttagtacttggatcatgaaataatctgtataccaaacccctgattacatatataacaaacctgcatgcgtatctttgaacctaagataaaagtttgttttaaaaactatctgggtgcagtggtgcatgcctatagttccagctactcgagactgaggtgtgaggagtgcttgagctcgggggattgaggctgcagtgaattatggtcccacctgtgagtagccacttcactcaaacctgggagacagagcaagaaccggtctctaaaaaaaaataaaaatagaaaaataaaatgaaaaatatatgaaataaagtctcctttccaaacgtacagatctccgatttttctgccaacaatgataaatggtcagtggcttgccatgttgtctgtgaattacttttaaaatattcacgatcacctgacctaaaggttggtaccaaggaaccgcctgaatacaccgtctctgattatttgcctccaacagagtgttccctgggcctgatctctggtggacaatgagctgctgggaacatcctctcttctctattcctcccctggggatgctgaccttcccttggagtctcctaagttccccagggcagtcggctaatgtcctagggagcttacctgtcttctccataccaagtctcatgtgaaggacgaggctttgcccttgcccagatgaggctctgggggctgagccctggctggctaccagctgcaagagccatggcccttggacagctggtaaatccttgttcccagtcagccctgcccaagatgcctcaacccagccccggcacaggcttcccagggtcacatggagtcaggatcctgggacaggggactggacaggggtttccagggctgagtttctgaacaggggcttcccaggggtcccctcactccaggatctgacatggtcctacaaggaacgtccatggggaggggacccaggagggggaactgacactgacctccccttactgagcctccccccaaccccatcagactgtccttcctctgtagcaagtgcctgcagggtctggatgcaggaaagaaattctgatctgtggaagtttgtctcccctgtgtgtgtcttgcactaaatgtccaaacccccaaatgggatgtaatgtagagggggacacaggcacagcccaggcctgaaaatcctgtgtgtgtgaagcagaactgacccccaacacccagagctcatgagacatcactgtgtacgtgaaactggccagttacttcttcattcacaagatctgtttttatgacttgtagggtgtaggatcctgtgtcattgttggtgacattctgtatcagcagacatgtattggggtatattgtctctcagcctctgtggcaggtcctggggtaattacttgagttcctagtacatatcctgtaattcccctttgtaccagttgtagccaagcctaaggcagattgtgggtgagtggaagaatctccttgccttctgcagcttcaacagtgacttgggcagtggtaggcaagttccagaaagttaaaagtgaggctaggagtggggagagagcatcagttaatactgggccctatgcattgaggtggaaagatggggccctaggtcctggacaggtctcttcatccctcagccttggagtgtgtgtgtgtgtgtgtgtgtgtgtgtgtgtgtgtgtgtgcgcgcgcgcgcgtgcgtgcgtgtcctactgggccaaggtcagcagcatgacctcccttccttcagtgcctctgaccttggcatttccctgtttggagtccttttccccaggggtctgcctggctccctccctactgccttcaggtcctgctcacattagggcatccttgggagaccccttccctgacacctctagagaccctgggtcttccctttctgacctttcgctgctgtgttccctccagggctcttgtcaatacttgacctcacattctagatacccttgcatgtctgtcttcctccctatgagagcatgagctctgtgagaacagggacttgtgtgatcttggttgcaccccagtgcctgggacaggctgcggactcctgtggatgagctcatgagtgttcccagggcccttcacaacgtgggatttattttccaatggctgaggttgttggctaagagctctgttggagttcaatcaggctggtgggaaaaatattagagatagttatagagatagacacaaatcttcttggaagaccaaaaagtttgcataactttggtaatagatctgactgaaggtggtccctttacctttagttaaacaaattaaagtagtaacaaaggaaggcagagtagtttgtctagccagcttgtttactcatgtgatcttaagactaaccattgatgtgccacaggtgcttaattgctttctacttgggaagtccacaatgtcaattaccctctaacggtgttgactcaagcctttgttaattaatcttactgaataaatatgagtctcactagctgatcaaggccatggtcacaactgtttataggactcagcagggagtctgtaagcggccctgacagactcagctggactggcaaagcaaaatatgtgtgtgtcagtgtacactattcacccgtcccccacagctggtgcccctatatgaggagtgctgccacagagctctgtttagtgtcccttgttttttttcttgagtattaccccaacttaaattgtgattattgtcatctgttttcaacattaactgctcagtgatgattcacttggaaaacattaacaatcgagattgtttcttcactaacaacctcagattatttagattttcctgttgtaatcccttcttcctgtttagtgtccaacagaagccctctgtccctctcaggtccccgttctctccaagaaaccccagccagtctctgtgctccctcctcccatccactcccagggagccctcccctcacctgtgagcagaagcgcctgccagggatgtgcactctgtgaggaggggctgagggaggccccatgggctctgctgtctgctttgtcctcctctgtggagaggagcttgggcttcagaaaataaggaggccagaaagtaaggaacaggctgagaaataatggggatgtgtcgaaaggtcacagatgccaacatctttgtcctatgcaatattatccataaaattacaggtttgagatatgcttaaattttcttctaacatgcattaaaataaacatataacttttaatagttatattaaattgtatttaatataaattaaatgctcttgtcagagctactgtgactgtcagctctgctgtccttcctctctctgtgctaagcctcctcccagggcagaagcacttcccagggccaggggtgggggcggggaaaggtaagtggcaatgaggatctgcacaggtagcctttccgcctcctcccctctcagtcctgcctccttgtcttcttttcctctttttctccaatctacatttcagttccttagaccacgctgtgagaagcaaggcttattgggacccccatcccttaacaggatgacctgtgctccccataagtgacctctgctgtgtctagggattggctctgtcagcacctcacagagagtccctggggcccccaaactcagtgttattttctctatgacacagaaacccctctgggtatgcaaggttttcctcatgttttctaatgtctgggaaggttggatttactcccagcagggaggtcacagagatgtccagggagtggggtcctagaaatggacaaatctagagctaaagcccaggtctacgattttcagttgtttttttctgcagtgctatgtgaccctaatttcctaggagtaactaaaatgcaaacctcagacatttgtagacattttatgatttttctctacagcttgtaccactgttattattatttgctttatgctttttcctaaataaatttactttacaaaacatccttgtcctagtagggtgcaggggctcacgtctgtgatctcagctgcttgagaggttgaggtgggtggattgcttgaggacgggaatttgagacaaaacatctttgtcctatgcaatattatccataaaattacaggtttgagatatgcttaaattttcttctaacatgtattaaaataaacatataacttttaatcatcatattaaattgtatttaatataaatttatatacaatacatttttatataataaattatatatataaatgtatatataatagtttttcttttttgagatggagtctggctctgtctcccaggctggagtgcagtggcacgatctcagctcactgcagcctccgccttctgggttcaaacgattctcctacctcagcctcccgagtagctgggattacaggcgcctgccgccacgcccagctaatttttgtacttttttagtagagatggggtttcgccatgttggccaggctggtctcaaacacctgacttcaggtgatatgccgcctcggcctcccaaagtgctgggattacaggcatgagccaccatgcctggcctatatattttatataattatataaagttttctataataaattttatataataatatataaaatggatatttatttaagataaagttattagttttatatatttacatatatttaggaataaatgtgttactgtgggagcccagtgcccaggcaggtagtcagtacatgatggttgtcattagggttaatactttggaattctggattttttcccaagagagtgtctacgctggaatattgggcttgtggctttctgctgatgtgcatgtgtgaagaagctacttccacttattaggacttgtgtatctgtctcgcagtttcactacctattttctcgtgatgttggtcaagtcgcctaacttttctgtgcctcatttacctaatttgtagaatatgggtaacagtacacaagtgtgagtgtgtatttcccaggactgaccactagagggcgtgaaggcaccggcacttactattacagcaatgggtgtagtagtgctcatggtcgtaaacatcattctcccatgaaaggaaccagggcttcctgggagaaataactgattccagggctggggccggaaagcacaagcggagcctggagcatctcgtgaggccagaaagtaaggagccggctgaaaaataatggagatctgtcgaaaggtcacagatgccaaccagaaggagctttgaatgaccaattttgagacaaaatgagcactataagaaataatgatagtaataaattccaacccataaatacccatgagttcctactaatataaataaataattgaatacataaatatataaggatgaagaaacagctttttcttacagcagaattccaattaatgaatgtagaaggaatgatcaaatagaaaatcactatttggctaacagcacagtcaattgtttgtaggcaagaattatcaatggactttaaatatgaatgggtaaaagtatgatgatgctacaactagtgagtaccaagggggaaaaaaaagtacgttgagaagaaacaggctacttccatattcccaaagtatcacttcaggagctacttattgattataatgggacaaatagtaacttacagtagagaaacctggcaacagagtctctccgaggtacaaaggctctcttcaggaaggaggtaaggggaaggaagaagaaaacactgtcctgcctcaattatttgctttccccattctcaagtgtacttcatagacattcaaagatatgtgttgatagtgtccacgatccacatggctctattatagtcatttattcacacatacattcagtgaggctttgagtgcctaatgtgtgcctgatatttgctagatggtggatgctgagaagatcaggtgtgctgctgtctctagggtgactgaatccacctgccccactttacagatgtggaaattaaagtgaaaaggatttataggattagttcactgtcacaaggtcactagccttaaagttacaggagtaaagcaagtttcctgacttgctagattttctgctgcaggtgctgacaatggtgagctccaataggagagaggacactcagagtgaagtgggagccctgaacaccctggattagccaagaggacatgccgggtccagctgtgaccgcacaaaggaccattggggatatttgtattctctttttcacttagagcttgaaatgaggaaaactaagtgcagaaaaccaagagtggaagatttttcacaaagcactggtaacatgcatcagaaaaccctgtgctgatgtctgtcacggtgtttctcactgaacggtaatagtctggctttgagtgtgttccctctacagcctggagttctgcgaggcagggaccaggtgtgattcatctttgtctctccagtgacagtacacagcaggctctgataaatatttcttacaaaataaaatggaataaaaagtagacatctgcacaggtgtgggatgactgagcagcagcagaagcaggaaaagtcagcgtccccagatcagctgatgtggtgttcggattctagataggggtgaggtgccaggatggggatgggggtcctgtggctctgctgccctgggggacacccctaggtttcacagtgcctgctgtggttgctgcactttgcttccccatgggaaagtgatcagagggtgtggggcttcaggtgaccccatgtgggaaatggccaagggaaggtggggtgggcggcacatggttttttttaaccaatatttgaaggtaggttgtatgaaaaggtgttaggcttatttcagcttatggggagtaggacagggattggtgagtgtgtatcaggtatattttggctcaggatggaaaagaactgtcacagtaacataaggtcttttgggaaattacatgtttactggcagagttcaggccagggctgggtgtctgaaaatacctgtcagggtcacttttatggttacaagggcagagcttggcttggaaccaggtttcttactaataccacatattaagtattataaaaactgtcctttgcaataggacattgctctatgatgcaggttgaggtccctctgtttaagtaattgtgggtggctgtgattctctcatctagtctgcgacttggacttcacctccatctgcagtccctctcctttgctgttgacactggtcagagttaagcgcatttactgacgatggtcacagggtggcagcactgcctctctggtattttctaaaacctcttcctggaactgagccagtctaagaggatgtcatgactaagaaaagggcactaatgaggtgaacagataattttttttttcttgtttctcctgtgaagtaacagagtggaggtgagcatggaataattgccttttagaaatggaagacaatggagagaagtgtttcgcaaaccttaatgtgttcacagatcccacacagatctttttattcaatacagattctgatttttctggtgaggcctgagattgtgcatgtctaaggagcttttggatgatgccattgctgctggttggcggaccacactttgagtagcaaggctcgaagatcatttagaggttaattctcactgcatctaatttatggatgaaaacaaaccaaggtccagagagagcatatacagcttgcctaacaaagccattccctaagtgcctgacttcttgcatttaaacccagggcttcagcctttgtccagttctcactccacacatcacacggtttgttcactgttgtgaacgacagttgtggcagcatctctttagtttaggaatccagagccccaatttcactaccctctttggtcttggctcatgctgtgacttcgaatagttttgcccttacttaaaatcttcagtggctcttttgtaatcacaagatcaagttcgaatatctctgtctagtgttcatggctttataacatatggtatctctttagtaaccttacctaacttccctgttttaaaattgtctcttgctgccatagccctccttgctccttcctgctccctaacaaactgtgttcacttctctctcagtggtagtgatgatggcatggcctctgatgttagactcatgtaacttctaatcccagatccaccaccaacattggcaagttgattcatctttctgaggataagcatcctcctctgaaataaacttagatggcggttgagaggggtaaataaaataacacacaaacccactctcatccctgagaccctcttcaaaactagcatataaaaatagctatttgaagaggttcagtgaaattcaaggtaacacagagaaggaattcagaatcctatcagataaatttaatagactgaaataatttttaaaaatcaggcagaaattctgtagctgaaaaattcaattgacaaaccgaagaatgcactaaatctttcaacagcagaattgatcaagcagaagaaagaatttgtgagcttgaagagataatatatgaaaactcagagtcagagagacaaaagaaaaaagaattaaaagaataatgcatgcctacaaggtttgattattaagctactcaaagagatacaagagaagggtgaaaaccaacataaagaaatgtaaaaaacaatcagaatataaatgaaaaattttctaaaatgctagctagtttttttttgagacaggctcttactctcatcacccatgctggagtgaagtggcacagtcatggctcactgcaggctcaacttcctgggctcagatgattctcccacattagccttccaagtagctaggactaaaggcgtgtgccaccaggccaggctaattttttgtatttttagtagagatggggttttgccatcttacccagggctggtcttgaactcctgggctcaagtgatccaggagattcactgccaaaaaggatataaccaagtcatatagtcataggttatctaaagtcaatgtgaaggcaagaattctaagagcagtgagacaaaagcatcaattaacttataaaggaaaacctatcagtctaacaccagatttctcatcagaaaccttacaaaccagaaggtattggggtcctaatcttttggcttcttaaacagaatagctctcagccaagaatcttgtgtagagtgaaattatatttcaaaatgaaagagagaaatacagtctttttcaggcaagcaaatgcttcaggatttgtcacggctagaccatcctacatggaatgttaaagggacttctaaatcacaaaacaaaagatttaaatagaacagaatagaacctcttgaaaccaaaaaattcaaatggcctataaaacaataacacaataagaaaacaaagtagataacgatcaacatgatgactggaacaaatattaacattgaatgtaaatgacctaacactccacttaaaagacacagattggcaagataaataaaaaatcacaaaccaaatatcagctgtcttcaagagactcacttaacatgtaaggattcttatagactcaaggtaaagagatgataaaagatattccatgcaaatggaaaccataagtgagaaggaatagctatccttatatcatataaaacagactttaagcaacaacagtaagaaaaagacaaataaggcaactatataatgataaaaggatcaatcaaacaagaagatattacaatcctaaatatatatgcacctaactttggagctcccacattcataaaacggttatgatgagacctaagaaaaaagatcaacacaaaacagtgagggtgtcctgggttttctttttattggacagcagtgtactagcctatcactttcccagtcaggggatttttggtctccccattcccctaccatgggttcatgccaaagtccatattttttattagtgtttggaattggattttttttttttgaggtggagtctcgctctgttgcctaggctggagtgtagtggcacgatctcggctcactaacctctgcctcctgggttcaagcaattcttctgcctcagcctcctgagtacctgggactacaggtgcatgccaccacacccagctaatttttgtatttttagtagaaacgagatttcaccatattgtccaggcttgtatagaactcctgacctcatgtgacagggaaacaggcactcagtgaacttcatgcgattgaggagttaatgataatgagagaagggctgtgaggggacagcactggggacaccagagcctgtgacgggctgagttgctgtgccttgggagatgcccttttgactgagccctgggaaggagggggtgtgggggcaggagctgcctgcagagggagtggcctcaggtgggcggccacctggctgcagggaagaggtgacagagttcgtgtgcagagcttggagggtgaggaggaggtgggttgaggtgaccttggtgagggtgaaccatggggggctgtgggccctgctgagggaggccagccagccctggacctacagggtggtttggtcttttttgtcccattcccagcatccactgagtggtgaaactctgcaggccagggaccatcccactggccagaaggagcgcacagtaggtgcccactcagtgcatgttgggctggacagaacctcactctgccccctgcccccagctttgggagctgcagcaaggtccctccccctagggatctccatgcctctgtctctgaggggtgagatggggagacttcaaagggccatctcagagtgtgggggatagagacgcagaagtgtgggggatagagggaggcctgggctctagacccaaaggaccttacacacctcctgagtcttttcaaatggtttcttctgttactttaaaaatgatgtaagtcatcatatttattgtaaatcccaggaatctaatcatgcgtaaaataaggtgtcttatccttgaccccaccccttccccaattaaatttccaggatgttaccactgtttgcagttggtgtgaatctctctttaataatactctgtttatctcacttgtcgttttacgccaaaatacccattgaattatattattgctgaagaccattcttttttttttttttttttttgagatggattcttgctctgttgcccaggctggagtgcaatggtgtgatctcggctcactgcaacctctgcctcctgggttcaagtgattctcctgcctcagcctcctgagtttctgggattacaggtgcacaccaccacacctggctaatttttgtatttttagtaaagacagggtttcaccatgttggtcaggctggtctcgaactcctgacctcatgatccaccctccttggcctcccaaaatgctgggattacaggcatgagccaccacacctgcccagaccattctgttctactgaatcatgtgtggtgggcacctcttatatcaatacatatggattttatcttgtgtttgttattggctcccctttttctcattgcatggctacactcaatgctttgtccacacccctgttcctgggttggaatcttgtgacagaaaatgaagtaacaaaggctaaagctttctaaagtggagtcaggagattgcaagacaattgcactttcaccagcaagagctcaaaccacagaatgttccaatagatttggataaacagctgaagtcagtattcaccagccttcaacatctcaactaggagaaccctaaaattaactaagcacatagaatggaatggacttgtgatttaggattccttctcagccaatgagctgcttctgaaaacaactttttgtggaaattacctgtaaagaaaaccctctcctgtgcttgtcttacagaacactagtcagggctgccctgattcagtggacccgaattgctattatttgtttcctaaacatatggtattttctgtgaccttcatctcaatcttttttttaagttactgggctgtttcccagttttcataatgacgagacattctgcagtgtttcatacacatgtcttttccccatgtggagtattgatccaggagctcattcagtcaacgcatgtttatgaagcatcctgtgccaggctgtgggctggtcactgtcttcagcagagagaggacaggcacagtcttgccttcacagagctcacagctcagggaggctcttagaagtgggatactggtcggagcatgtgcacattaaacatgatgaggtcaaggttgctatagggactaaaccacagtcccaccaagatcgcattgagttcctgtggtagaccagaggtcagggcccctaagatgtcctgagcagctccctctgctcagaagttttggttccacaggtgacacacctgagcacaggtgacccctgcagaacctgtgattaccacccaaagccaagagtgagtggtgggtgttctaggaggaaccgtcacctccatgggcagggttggggaagactgaggggagcaggtggctgatgactttggccagaaggtagggggatgggcaggtgtgcgctcatagggaagggaagagaagggagggcattgcaggcaacaacacaaaggttggaacctgccttcatggactgagaaaagcagggagtccacccaggctgcagctggggagggaagacatggggagcagtgggtctaggggagaagcagactgcgattgaccttggggactgggcagtgagcagaggtgtgttatgtgtgtctgtccccatcatagatatgaggaggggtgaggccgcgggtggcacctgggtcggtgggatttcatagtgcctgctgttccctagagcctctctgtatagagggtcagaatagatctgaggctgtggtctgggggaaggggctggtggtgcttaccatctctaggggtgggaggagagggatgaggatgcccctgagcagtgaagcctcaaggtgtgtggagccacagttgtctctcattagacatgtgttttgcgtgaggatgccagggcctggtggttattactgttgtcaagtttgcatgacaaggacccaggtatccagggatccagagcacagggcccctggtgaggggatgaggctcagatggggctgaccaggttcatgtggtcagagtgggagggactgatggagagacagagcctcaacccctcctgtcaggagctgtggctatgtccaggagagatgacaaggatgacccaggacattgagtgagtcattgagacattgaaggtgaggacagggcagagaggaccctggtgactgctgaaatgtaggatgtgaggagggctctgacccatgcaagttacaggacctccccacccccgagcccacagatgacccttaaattgggcatcctgagtgctgtgtgtgcccagcagggacactggataggctggacctgagtctctgtaagggcagcgctggtctgtaggaccagagtcttctctgtgggtgtgacgtgggcaggaattagcaagatgggggtgacaaggcttggcttggaggatctggtacagaagcccatgggcttggtcagctcagcttctcaggggctcagctggggctggaggagcaggatgctgtgctcagggcatgctccaggcagcgtgatgtgtgtggttccagggtcaggcacgggggtcaaaaattaaccatgaaaagttcccaccttctgtaggcagagaaaatggcctgattgtcagggtcagggagacttaccatgtggccaaagcaggctctcagcctcccagagaccacaccctgggtgcagcactcagctctgcagggtatggcaatagatgtgccaagaaccccaacatccagatgcatgcaaaaattttgcgatatataaaatagagcagatcaagtttccctgcaataacgttgttcctggttgtgtctttttcttgtaaactagacatggacatctttccagcagtctgttctcatctgccaccttcctgctgcagcacctcagaatgaacattcctgagacactgtccgtggtgctgacgaccaagagctatggaacagagtgtgatgtagaatcttctagttacctctgctctcctttcacttttaacaacagagcatcattaacaatgagaaggtggagaggtgttcaggatcttgaagtgacttctgtcttgctctcccataaccctgaagctgctgtagacattattgcagaaactgacaccacagtcaggatggccttgtccaggagcccatgtgcagtttgtagtgagcaaggatgagaaaatggtcttgaaaggggtgatggacagaacaggggcttttcaaaaatgtcacatcatcacccccagcatccgtgaatctgtcacatggtaagagaccttacagattaaatgaaggattatgagtttggaagattattgtagtttatccagatgggtccaacataatcacagaatcccttccttacaaatgagagagggaggtgggagagtcagagaaggaggaggagatgtggggatagatgcagaagacagagcggtgtcaagatgctgcactgctggctttgaagatggagaaagaggacacagccaaggatgcaggaggcctctaggaggtggaaaaggagaggaaacgcactctgccctggagcctccagaaagaacgcagccatgtgggcaccttggttcaagtttctgtgtcacttagcttgtgggaatttgtcacagcctcaacaggaacctacagaggagtcaccttgtgtgcaggtgggatccagggtcatttacagctaaatcctgatgtaaatattgcaggttgcttttcctacttcctatctcatggccaacaaccctggacaatggcagaacacccttggaaaccacggctctgtgctttagtggagggaccagcttgtttgtgggaaggtagcacctggtccaagtgaacctacatgagatcgttactctccccagggccctcagggaagggctgagaacagctggcccaggtgtgtggaggagctgcaggtgaggcagggctggaggggcctgtgggtccaggtagaggggcagacaggttgtcccatcgccatgggagcctgcacgagctttaggttggggaaccctgctcctctgacctggacgctcctgtgtggagaggaggcttgctcagtgagatccacgccagggggtaaattgggaactgatgggaaatgaggggctagagtcctgggtagtgcctgggaggaccttgctcaaggactgaattcttggtctgttcccaccttggttactctgacaacccctctctgtgtcccacggggataaagatctcctgagcagtggccattgggacagaggagaacctggtggccagagctaagcatccaggatcctggatttggggacaggcaagctcattgctgggggacagtgatagatacggcctccagggcctgggtgaagagagcaggagggctcaggacactggaggctgtgtggaggtcacacccacgatctgtaccacccatggatgctcctgcattgctcacctttgtgtggacatcagatggccccaacttttgcactcctgagacatctcatgcattcacagagggacccaggctggggctgtgcatggccttggtctctagggtagtgtgaggacagctgagcactcagctggctgggcaggactcctgcgaatcctgccctttcctgtgtagggtccaccccagcctgactcctaaccccctactcctgtctttccagggaagagagactggggttgagataaggtggagatatttttcctgtgtgacccaggagagaatggacatggagtttcaggtgagtttctgctaagttcccatgagcagaaaaagagccaatgagaggaagtttcccctttattcagatcctttccaggtgaccccgggtgggccataggcccattcactttccctgcaagcccccgcttcctgtggtgatgggaagccttcgccttggcccacccagagcccggggcagtctgttgaggtctctatatattcagcagggacccccatcccttcctgtccccaggcctgtgtctcctcaggactcagagctggttctctggctcaggctccatgtccttccccatccccagggctgggggcttcagggacgctccatcaacccacaggagcagctcccagaggaacctaagaagccacatctgctttgtggtcgatccagcagtaaatgtttgtgtcagagtgtagcaattccagtaaaaacagagaagaggtcttgacccctgaggccttctcagaacagggtctggcatctctctctgggcccacccagggctactctgggactgaacctggctgtgctcagggggttcctgctcccaggcccctccctcctctgctcaccacctcctgttattttcactgcagtttcctgaacttcagctcagccagatgccagtggggacagatcctgggtctccctggggcccaagggaccagaatatctgtggcccccactcacctcatagatgagagcagctgccctggtgctgggtaggggaatctgggcaggggagagaggggtgtcaggggacagggaaggattcctgctgtgtaggaattccagggctctcctcaggtgatggagggtcccagggtggggttagcacagggagtggatgatcctggccctgaacagaggcccagctcatggccagggcaggtctaaccttatccaagtcattctgggtagggtgggtttgtgctggggattgacagtccccctgccctgagcctgcacagctggggccccagtggaaatgggattgggaacggacagtcttacctaggagatggagctgtcagagggtccatggcctggggacagagacaaaagtgagcacgagagtgttaggatagctgggcccctcctgcaagagtgtgtgggggtcctcagttcttagagaattggggagagggagcctttctcaggttattttaggggtcaagtaagcaagtgaggttgaggaagtgacccatgacccagagcccggaggttagggctgacccggccagttggggtttcctgtgtgatgttttatgggatcctctttgcagccccagggatagggtcagaggcccctgggtgtaactggcaggagtggacaacttggggctggcttagtagttcccagccacacccagactgaagggacactcaccgggggtggaggctgggggctgctgctccctgaagtcactctgatcgctggccctaggaaaggtcagggttatttgtgaaggtgcaaggttaaaagtcacaaattggagttaaaataggggaccaggaaaggagcctatttccaagaggggtatggagacctcctttctttatggagttctgtggtaggaggggcccaggtgaggggagttgaggaaaggccttacaaagccacatctgtcctggccagaggggaaggactctcaggcagatgctgggccaggagaacattgatccagtgacacaggaaagggactgaggacccagggaaggaatcagaccaccaggggttgcctgagaggaagggtcaaggcaccagggggaaagcagggccaggcacatgtgcaggacactgaggggactgcatgcatcttggattctcctggaactcagtgtccctgctgtgaccagacactccactcagggctggagatgctgaaatgggacaatgatcttgtcttctgtctctgccctttggcaagagacataaacgacattccaggatatgccatattggggccccggttctcccttctcacagctcagtgtctgcagttaccatgtcagtcaaaggggtgctgaccccacccagcccgtccaggctgttccagtctccactatgtgataatgcccaggatcccccctcagatgccctctcactgggtggatggattcagtgaacagggggaggtaccaggtattgagcaccgctcccccctgctccaggcagctgtggctttgctgtgctaggaaactaggaccatgctcaggggcatggccttaattggactgaattcactgaggacaaagctgttgaggaagcagcccagggtcagcagctggtgaggaaggtgccatggaatgagagggaaggatccctggggagtcgggaggctggggagagcctggcactgaatacaagacagggtctccttccttctcgcctggggtcagcgtgaaggatgggagcagaatggggaaaagctgtggtacctgccagtttttcggaggagcaggaaacacacaagtgcagccaccagaagactcccaaccaggaccccgatcaggatgcctagagtgttgtcatctgctgaaagaagaaggcaaaggggatgaggtccaaatctgttccagggggaaccatgaggggccttgcagggcaggggcatggtcagggaggaaggaaatgccatggagcctgagtgtggtctgttgtgctgtcctcatagctggctcccttgctctccgtggttgcaccattttctgtgtcttaggcttgaattactgggatgcatcaactcctacattctcccacaggaagcctgcacctcatcctgctcctgtgttttttagtccctccttcctctcacatcactcctcttccccctgtttctttttttccatcccatggcagtcgtaaagggcaggcccttgctgccaactcaatgctgatgagcagggatgatgttcattgactgttttcaggggccttccacatggaaggcacagtgggaatcaatctacctgcagcttttctcaccctcccattgccttgagggagaagggtatgtgatattgtgaaatacgtatttggtgttcatcaccattgatatggttaggctctgtatccccacccaaatctcaccttgaattgtaataatccccatgtgttatgggagggaccttgtgggaggtaattgaatcatgagggtgggttttttccatcctgttcttgtgatagtgaataagtctcaggagatcagatggtttcataaagggaagcttccctacacatgtcctcttgcctgctgccatgtaagacatgcctttcaccttccatcatgattgtgagacctctccagccatgtggaattgtgaatcaattaaacctctttcttcatacattaccaagtctcaggtatgtcttcattagcagtgtgagaatggactaatacagtaaattggtaccagctagtggagtgctgctataaagatacctgaaaatgtggaagtgactttggaactgggtaacaggcagaggttggaacagtttggagggctcagaagaagacacaggaaaaaagtttgaaacttcctagagacttgttgaatggttttgattaaaacgctgatagtgatatggacaataaagtccaagctgaggtggtctcagacagagatgaggaacttcttgggaactggaacaaaggtgactcttgttatactctagaaaagagattggtggtattttgcccctgccctagagatctgcagaactttgaacttgagggaaatgatttagggcaactggtggaaaaaaaattctaagcagcaaagtgttcaagatgtgacttgggtactgttaaaaacactcagttttatgtatttacaaaggtatggtttggaattggaacttatgtttaaaagggaagcagagcataaaagtttggaaaatttgcagcctgatgatgcaatagaaaagaaaaatccattttctgaggagaaattcaagccagctgcagaaatgtgcataaacaatgaagagcaaaatgttaatccccaagacaatggcaaaaatgtctccagggcatgtcagagaccttcctggaagccccttccatcacaggactggaggcctaggaggaaaaaatgtttcctgggccaggcccagggctcccctgctgtgtgcggcctagagacttggtgccctgcatcccagccactccagccatggctaaagagggccaaggtacagctggggccatggcttcagagggtgcaagccccaaaccttggcagcttccatgtggtgttgagcctgcaggtgcacagaagtcaaggattgaggtttgggaaccttcgcctagatttcagaggatgtatgaaaatgcttggatgtccaggtgaaagtttgctgcagaagcagagccctcatggagaacctctgctagggaagtgttgaagggaaatgtggggttggaaccccgacacagagtccctactggggcactgcctaatggagctgtgagaagaagaccacaatcctccagaccccagaatggtagatccactaacagcttgcaccatgcacctagaaaagctgcagacactcaacgccagcctatgaaagcagccaggagtggggctgtaccctgcaaagccacaggggtggagcccaaggctatgggagttcagctcttgcatcagtgtgacctggatgtgagacatggatacaaaggagatcatttcagagcattaagatttggctgccctgctggattttgggcttgcatggggcctgtagcccctttgttttggccagtttctcccatttggaatgggtgtatttacccagtgcctgtacacccattatatctaggaagtaactaagcttgcttttgattttacaggcttataggtggaagggacttgccttgtctcagatgaaactttggacttggacttttgggttaatgctggaatgagttaagactttggggaactgttggaaggcatgattagttttgaaatgtgaggacatgagatttgggaggggtcgggtggaatgacatggtttggctcttcttcacccaaatatcaccttgaattttaataatccccacgtgttgggggaaggacccagtgggaggtaactgaatcatgggggtggattcttcccatgctgttctcatgatagtgaataagtctcacaagatctgatggttttagaaaggggagttcctctacacatgccctcttgcctgccgccatgtaagacatgccttttgccttctgccatgatttcaaggcctccccagctatgtggaactgtaagtcaattaaacctcatttttaaaaaaattacccagtctcaggtatgtctttatcagcagccaagaccagctcggtcgcggagatcctaacccagcagtgctagaggaattaaagacacacatagaaatatagaggtgtgaagtgggaaatcagggttctcacaggcttcagagctgagagccccaaacagagatttacccacatatttaataacagcaaaccagtcattagcattgtttctatagatattaaattaactaaaagtatcccttatgggaaaccaagggatgggccgaattaaaggaataggttgggctagttaactgcaacaggaacacgcccttaagatgcagattgctcatgctattgtttgtggcttaagaacgcctttaagcggttttccaccctgggtgggacaggtattccttgccctcattcctgtaaacccataaccttccagcttgggcattagggccattatgaacatgttacagtgctgcagagattttgtttatgaccagttttggggccagtttatggccagattttggggggcttgctcccaacagactaatacacccattttctggtatgtgactctaaagtccttagaatcttcaaagtgatgtctttttcaagctaataattgactgatgactggcagcccctaggcaacttcagaatgaggctggtcactgacccaggtaggattagagggttgggactttcagcctcacccctaatccctggggagggacctggagtttgaattaatcaccaatgaccaatgaatcaattaatggccaatgattgaatcaattaatggccaatgattaaatcaatcatatctatgtcatgaaccccaaaaggactgggtttgaagagctgaacccatggaagtttctggagtgtggtgcatctggggagggcatggaagctccacaccccttcccacatgccatgctctgtgcatctcttcatctgcatcctttgtaaagtcctttattacaaaccggtaagcctaagtatgtgtttccctgagtcctgagagctgtttgagcaaactaatccaacccaaacagggagtcatggaaacctcaatgtgaagccagtcataagaagctctggaggcccagacttgtgactggtgggaaggtggtggcaattttgtgggactgagccctctgctgatatgtccaggtagatagtgtcaggatggaattggaggacacctagctgatgtacggtgcagaactgattggctgctgggtgtgtgggagaaacccccccgcatcacatttggtcacagaagtgtgtctgtgttgatgattgttattgtggagtgagagcagaggaaaaacacagtttgagtttttccaaacagggtggaatcccatctgccaatttagaatctgaaacttatagtttcagtacttcaattaagattgaagtacttcaattcagtacttcaattaagattcagtacttcaattaagattcagtacttcaattaagattacagaactggtaagtgaaagtgatacaacaaaaatgtaaccaaagtctgctcaacttaacagctaataacaacaaagttcataaaaataataccagtcgatattgatagcactgattgagccctggctctgtgcatgaccttgttaagggctttaatcgcattaatctctgaataaatatcctcacaaccaccctgagatccaggtgtttgtaacaattctacagatgaggaaactgaggcccaggaggttgagtgtcttgcccaaggtcaaatacctggtacctattgtaaccaggatgataactggatgagtctaatccctgagttcttacccacattgctccccaggctctgaaggaatctcatccttctcattccgtgtatcattttacaccccccctccctcctaggaaaatatacaaggaaaggagtgagaggggccgagggtcactcacattttacagtcagcttgagggggtcgctcctgttggagctgactgggttggagacctcacactgatactccccagcgtcctcctgcctgatggggtctatggtgagcatatggttaaaccaggacagcttcatcctcttcgtgacctgcagacgctggttgttgaaaatccactggaaagaggttccagtgttatttgtgtggcaggtcaggaccacggagcccttctctgtgactgtggtgctgctggcttggatggagggctgagccactgactctgtggatagagtgaccaacagaaagtgtcttggggccatgctgcatcctcagagatctcagagtcaaatttagaacattctcctgtgaataaaggagaaagatgaaggacagggaggagcagagagaaccagagacacccatagcagcgagcagtagggactacagtgacctcagagaccccagggaccaggaggacccagctgcctcagaccaggaccagggagccctgaaaaccctcccacagatgagcggccccagagtcacatgagatgcaatacctggggtggctttaggagcaggcagtcagagaaatggaacatgggtctcagcccctaagggacaaggaagaggtgtggccagctcctcctaggatcctacatccaggacccagtctgtaaagaggttatgattattcctttcttttttcattaattccctccctccttcatcagagaactactgagtgtgtgtctcagttgggccttgtgcaggtacagggtgtagtgggaagagaaagctgagtcctttccttcatcctcccatgggagtgacatcaacaaatcaagaaattcatgatttcacgtccagtgagggaagaaatgtggatctgatgggagaggcttggacaatcctggcattgagtctgatagttgagacaggtgatttcgttctaagtaaaaactgactaattctccatttgcccgtcattcctcagaccagaatctccctctctgagctgaggatgcccaagaagaaaggagctgaaccaacatctggtcctggggtccacagatgccccacggtggtggccacgaccagattctgggctgcagacacacggtggtgtgacgttgagcactgacagcctgtgtgatgctgatgcaatttctctttaataaaatggggtaaatgtcaatggtccctggcttgccatcctctctgtaaattaacattaaaatatttacaattacctgacctaaagcttggcacagaatagctccaaataaacatcatctattattattttactccaaaaaaaaaaaaaaaagagttctctgggcctgattcctggtggagaaggagcggtccagagtgtcttttctctgctttccctcctcctgaggacagtgcacttcccgggacatcttttaagtttcccatccagtttaatggcctgggaagtttgtttgtctgtcctctccactctgactctcaggtgaaagatgaggctctgcccttgcccagatggggctctgggggctgagccctgcctggtgaccagctctaggaaccacggccctgggacagctggtaaatcgttgctcacaatcagccctgcccaggaagccacaacccagccctggcacaggctccccagggtcatctggagtcaggatcttgggacaggggcctggggcaggggcttgaagggctgagcttctctcagaggatcctcaggccaggccctgactgagtcctataagatctttctcaggtcatgtctatgaggaggaggccaagcggggttggactgagactgattttcccccgctgcatctcccgcatcagactatccttcttgctgtagggaatttccacggagtccggataagggaaaggaattctgatctgttatagtttgtctcccctgggtgtgtcctgcactaaatgcccaaaccccaacatgggacgtaatgcagagggggatgcaggcacagcccaggcctgacaatcctgcgtatgtgaagcagaactgacccccaacacccagaggcacggaggaatcactcaccgtatacacggagatggtgagatgcctgttcaatctgagaatttctgtatgtgacttgtagggtgtagtatcccgtgtcctctagggtgacgttctggaaatgcagatctccactgggtgatattgtctctcgaccgctgtatgcaggccctggagtcctaacgtgagtgtctattacatatgctgcgattagctggttgggctccaccgttttccctttgtaccagccatagctgtaaagattctcgggcagataaaccacagagagatgaacattctccccttcagcaacttcaaagggcgctgatgcaataaagagccaggcagtggtgggtgcgttccagaaagttaaaagtgaggctaggaaagggagagaatatcagtcaatatttgacctatgcattggcatggaaagacggggtcctgggtgcaggtctcttcacccctcagccttagagggtgtgtgtgtgtgtgtgtgtcctactgggtcaaagtcagcagcatgaccctcattccttcagtacctctgaccttggcatttccttgtgtgaaccctctttcccaggggtctgcatggttccctccccactgccttcagttcctactcacacaagggaatccctgggagacttctttcgtgaagcctcctctagagaccctgggtcttccctttctgacctttcccagctctgttccctccagggctcttgtcagcacctgacctcacattctagatctctttgggtgtctgtcttcccccccatgagattgtgagctctgtgagggcatggacttgagtgatgttagttgcaccccagtgcctgggacaggctgcagactcctgtggatgagttcatgagcgttcccagggccttccatatcctggggtttatttgctaatgtctgaggttggcagatgaagacagagtttcatgccctggtggtgtttttatttaaattgtcactgtgatatagttttactatcattttcaaaatgtagtggccactgacaatgaacttgaaaacatggaccaactgagattgttttgccccttggcaattccagttcacttagattttttggttctccttagacgctctctcccctgagtctctaacaaaagccctctgtctcctctcagagccccatcctccccaggagaccccagccagtctctgtgctccctcctcccacccactcccagggagtcctcccctcacctgtgagcaagagcccctgccaggggatgcattctctgtggggacaagctgaggggggccccatggtctctgctgcctgctctgtcctcctctgtggagaggagcttgggctccaggaacgctctagacagggttactgtgactgttgtctctgctgtccttccttcctctatgctgagcttcctctcaggcaggagcacttcccgtttatgggcaagggcggggctctgcctacaatgtctctctgtcccctcccctctcagtcctgcctcccttgtccctcctttctccttcctttttgcctatatttggttccctaggcaaaactttgagaagcaacgctgatggggtcctcataacaggacgacccactctccccagtactgacctctgctgtgttctggccttggttctgtcacagccggtagattatttccctttgtgacacacaaaaccagctgggccctgggtctcctcatgctctccagtgctccaggaaggcagaatgatgcccagcaggaaagtgacagaggtggctctgggggctagaaaggggctcactgggtgatggctgggaaggacccacccgctatcttcagtgtcaccagcctggcctctgacccagggacagagacccaggcctggaggtctcgggaggatccccagctcctaggtgtggagggaggtgtcctgtgtgtcctgggaagagaggactttgatggaaggaggtgggaggctctgggttctgctgtccttggtgaaggtttcagggggaccctctccatgtctggggtctgtgcccccagcttaactctcattctctttgcaaatacatatattttgtggatctgcagttgcctgaactgtctcatgtccctaaatctttgtatccctttttacagaaggtcaggaagggtgtgtacatgagtatgaggactatctgatcagggcgagtgtttgtttcccaaagatctctttagatatggtataatacataagataaatgtactgaattagcaattttaagtgtagaattaaatgatactaattctattcacaatgttgtacaaccatcaccataattttttaccagaaaatcttcattataccaaatggaaacttcatacttttaatcaataactccccacttccccctgccccacccactggtagcctctgatactatcaatctctgtgaatttgcctagtttacatgtctcatataataaggaattatatacgtgtattatttttttctggattatttctcttagggtaacacttttaagattcatccacgtcgtagcatatattacagcttctttcctatttatggctgagtaatatcccaatatatgtttatacctcaattttaattcattcatctcttaatggacatgtgggtggtttccacatttttgctattgtgaaaaccgctgcaatgaacttacacttggaagtatctgtttgggtttctgtgttcatttctttgggggtacatataggagtataaatatggggtcatgtggtagttctatgtttaagtttttgagaaacagccaaactgttttccagtttgctgtgctattttatattcccatcagcaatatacgagggttccattttctctacattcttgtaaacacttactatttaatattttttaaaacttatagccattctagtaggtgtgaagtgatagctcattgcagttttgattttcatttccctggtggctgatgaagttgagcattttttcatgtatttactgacaattttaatattttttagagaactatttattcaaatcatttgctgtttaaaaaaaatgggttatctttttattattcagttgtaatagttctttatatattttagatacaagtcccttatggggtacatgatttgcaaaatttttctcatattctgtgtcttctcactttcttcatggtgttctttgaagcacaaacatttttaactttgatgaagttcacttatctatttttaattttgttacttatgctcttgatgtcatattgaagaaaccattgcccaatccaagatcattaagttttactcctatatgttcttctaatggtttgataagttttgctattccatttaggtttttgaaacattttgagttaacttttgtatgggctgtgaggtaggggtctaactacactatctcgcatgtggttatccagttgttccagcacaatatgaagaggctaccattctttccccattgaggaatcttggcacccatgtcaaaaaccaatgggctgtaatggtgagggtttatttctggactcttgattctattccattgatctctatgtgcattcttgtgccagaagcacactgttttaatgattgtagtgttttagtaagttttcaaattaggaagtgagtcctccaatttttttttccagattgttttggccattctggggtgacttttaaaaaagatgtagttcaatggttctcaaagcaggagtggttcagctctccttttttggcagtctggagacctttttaggaccttaatctaagtagataaattattcccactttcttttctgagttgctatgttacagtgtatattgacacccatgaaataattgagagaccctggaagtgcttgcctacatagtgagggacaattagttccatgatcatgggcacagaagattttgttttgggaaacaattttgttggtggagttatattcatgcttactcttttatttgtcttcatagcctgcatctccttcagacttcatatctgtttattttcttgtttgtcctctggggtttgggtgttgggtgaccagtcagctggagctggaggaggtgcttagcaaggcagtgaccctggttgggaggagcagggctcagcagggtgaaagtagctgggccttgagtcaggagtggcatctggaaggcctgactgtaagggtcagaagggccagcaggtgggtgtcctaggcacaaacggtggctgctgctgtggactggaggaaggtaagaggccccgagtattccatgttcttactggctccccaactgaggattcctctcctgggctggtgctgtcctgcagcagggaggggttagacagggacggctgcacatcaggccggagtccatgtcatcctcttaggcactgtcactacagattgaggattctgttcataagccaagcctttgcacaaggaagggacccgggctctcaaggaagagcagctcctggtcagacctccatctccttctctctcattgcctgaggcctcaagcttggtctacctggcacaggggtctggatcctcctcccagggttggggtcttactgagctgggcacctgcaggtgggagaagatctggaggggccccatctgccttcaccagattgatgttgagggtccctgagtcctgcaccactatcaggtgctgagcaacttccagtgtcagtgacaaccaccccatggtggaagcagaaccacctcgtgagaaagcacctccaagcctcagtgcttgccatgtgtgggaatttgctggtttcagttgggggcatgttggtgggtggtcatgaattcagggccggattctatgctcacagtgcacatgctggatgtggtacagaccccaggcagggctcagtggggtggttttgggtgtgcacaggtatcttttctggaggagctggtggtgatttggctcccagaagttcctgagctctgcagactcaccaagcactcaatatttgagtgaacattgggcgagagagcagaaggtaagtgtcagggcatcggggttggtgcctctgggaagaggaggaacattctgggaacaaagctctcccccggcttacagggagcttcccatcgctcctgccttgaggatcagggaaactagggcctctgctcttccaggggctgcttgcaggcagtttgctctgggagggggtgacccaggagttgcctctcattttgcatttgagatttaaaaggagaagggacagtatatcttgccaggtcacaaaaattacaggcatcatattgactgaagggcactcctgtcatcactgcaatataccagaatggtcttttaaaaaaataagtgatttaggtttaccagcaactgtaatgcttgttttattcttctagttcaccgttaatgtcacttttgtagttttagcactggcaatgttgattttatgttgactctgatgattttaagctttcatttgttcacatagagatcatcttctttctgaatattaatgcattttttctctatttctactggttattcctgtacatagagtagagaatcacttttcccaaggaggtggaaagcttctgactaccaaaaaaaaaaaaaagtgtcaaaatgctttaaagtcagtaacttaaagatcaaatccaagagtgggcaacagattctgcccagggtctgaaaggtggagaggtgactggtgaggatgtttaaaagacctctcctctctactccctaaatgggggccatccagtgttcttgaggttcagagaaggcccagggctggggcagcagggcactgtcagctcccagctcccaggggccaggagtaagaccccaacactgtccagacactgattgcattcattttgggggagagtagattcttatttaaagaataatacaaaagtctacaaatatgaacataaacagaaattcctttgctacaattttccccttaataagacattccttcctaatgacatatgtgactgcattcatggctgagatgttttctaggatggtgagagcatcagagtggactatctggtgccttggggtcatgcattttcttcttccaatgtctacaggatcccccatgtcccactttgtagtgtaactcagtgtgtgtcattctggtttttgttgtatagatccttggaaagcccatgtcattcctgctgtgaggtacaggcagccaaatggcatcatctctaaacatgccttctcctggtacatcaaattatggaataaatgaaagccattttgacagatattgaagatataagtttctactcttcccacacatgcttctcccaagtgaaggattttactggtgaattgttattagagattagtgtggatcagtgactctgccaggggaaattttgccctctaggggacatttggcaaagtctggaaacattgttggttgtcagagctgggggagggagtcctgctggcattgagtgggtggatggtgctgaacaccctgcagttcacagagccccaccagtttgaccacccaaatgtcaatgctgaggagtggagagccctgctgtgccctcccgcagcttccctgaagcttcccctcacctgctcctcccatgtctccccaccacttccccacttcacccgcctccttacacctcagtcccctccacctgaactcaccccttagtccaaggccagccctgatctccgctctcctggtctccttgctccttagcaggaggcgcccactagatggcgcccttgcccttactggagctcaccgtctccctttccaccctgagacaaatgtggctgcttttactgccacaaccccagccctccacactctagatttgctcagggagcagctcctggacagacctcagggaccccagggaggagcctcactctggagattttgatggcatggtctttgaacttcactgttacccccagtcaggatccaggatgttgggagtgcatgattctgcccggtcccacttcagcaggaccccactgctgagttgtctgtggggacccgggcctctcatctccttcttgcattgcaggagagggatcttagcactgctttcacataaagtcagataatggaggagtgcaggtgagtttgggaaggtggacatgaagagaggttgtgtccctagaggtggcagcagtgagaggatgggcaggtgggaggaacacagcccatccagggttgccagccatattaggagcgacagcctttcctctaagcctccagcctttttcctgaaacattccagaactttccacttcagcacttcccactgaggctcctcaggtctgtccctgagctcccagctgagcctacctacccatctgaaatcctgagtcctgtgtcaccctcgttccccattattctgtgcagttctgtgggacgcccagctctcctgacacccccagtcttcagaatggccatcagcgctgtcgctgtggcaccagggtgactgccgcctggaggctgagtcctggcttcctgacagctgtggggcccgctctaggctcccttgtcctgatcattcatcacctccaggatgcacagcagctgggccagggggaggagcagggacaggtgtcagccaccctgtgtgtctgcaagtcaggctgggggtgtgggaggacgccaggaatgactgaactttctgatttagagggtgagagcttgcactgatggaatttgggatttaataggaaaagcatagcgttttcctattttgtaggcagggtggctggagtttggaatcatagattcccctgggatgtcactgtggacctcagtcccacccgttaggggcacagatttcagaatccacaccctggggcaaagcaggcatgggaggctccatcagcctggccagggctctctatttgtgcagctgctgcaaggagatgtgcactctgatgggaacagtgctccctcctccttggggggcagtatctagctccctgcagcccctctccctgcaggccctgccctctctgaacctcaccttccccaacccgccccccgcaatcccatctcagctgtaatcccaacactttctcatccattatgggtggactgcttgagcccaggggttcaagactatgctggctggacaatatagcgagttgttgtctctacaaaaagacaaaaattagctgtgcatggtggcatacacctgtagtcccagtcactcaggaggctgaggtgggaggattgcttgagctggggaggctgagttggcagtgagttgagattgtgccactgtatacttcagtgtaggtaacagagcgagaccctgtctcaaaaaataaaagtaaaaaaaaaaaaagaaatatggaatacattattgttaactctaatcaaccatgctatgcaatagtccaccagtaataccagtaatagccaataatgaattatctgaaaaagaatacaatttattcttagctatctactgctaaaatttttaagctatcttttatgatagctgaaacaaaagaagtaaatttaaccaaggaagtaaaagacctttataatgaaaactgtaaaacattgatgaaataaattgaaaaagacacacgcacaaatagaagatattccatgttcatgaattggaagaactgatattgctaaaatgtccttaccacccaaagtggtctacagattcaatgcaatttctgtcaaaacaccaatgatattcttcgaagaagtagaagatcctaaaattagaaaccacaaaaattcctaaaacctgcacaaaacaccctgagttgccaaagcaatcttaaacaaatagaacaaagctagtggcattacacttcctgacaatcaaagcatactgcaaagctatagtaaccaaatcagcatggtcctggcataaaaacaagcacatagatcaatgaaacagaataaaaatcccagaaataaacccatgcatctctagctaactgattttcagccaaggagccacatgcacacaatggggaaaggacagcctcttcaataagtggtgctggggaattggatattcatatgcagaagaatgaacctagaccctatccctcaccatgcacaaaaaattaactcaaaatgtattaaataaagacttaaatgtaagaactgaaactatgaaactactagaagaaaatatagggggaaaatccatgacattggtctaggcaaagagtttttggataaaatctcaacagcataagcaacaaaaccaaatataaacaaacgggatttcatcaaactaaaaagcttttatacagcaaagaaaaaaaaggccagcagagcaaagagacaacctacaaatgggaggagaatatatttgtaaatatatacatatatatttgtaaatatatacatctgataagaagataatatccaaaatatataagaaaattatgtttctgtatagttttatctgactgggatacagaggccacatccacagtcccatcctcaaaggccacttgttcccaaaatgtcaagcacatccctcaatgatccatcatcaacacctatgtctgtaggatgaagggtgaatcatgaagcactaaaaaggaagaaggaagccaatcccaaaacaaaatgatgcagggtctggaaagtccaaagcattttttttttttttttactgcatcttcctcctttcttctccacattcccaatcctcactattgattaacaaaacaaaaaaaactgggacccaccatcttccctactgtcaggagatctagcgagattgtttgagtcttagaccaaactttgccataagccaaatttctggctgactttacaatgatatgagctagcacagtctctttttctgccagtcaacttgtgctcggttttatttgcaaccaaatagaggtggtaaccaaatataggtgaccctaaaattagtcatcaggatgaaatcctaaaatgtgcaacaaactgggttgaattcaggattagtagcaacatctctgttgtgggcttgaaaagggggcacccttttatgcagtagcaaaattgctaaattgttgtttgctgagtctttggactctcatcccggattttctatgaccattcaaacagggctgcaatgaacatctatggttgtttagcttggcacacttctacatttctatatagtaatatctagaagtgcatttgctcaatcacaagatatgcacattttataattgactgctatcgaactaccttaaatagccttaatttgttctcaacattgtttaacagggtctgtttaatgtcctacgtccagcaaggacagtatcacttttcttaatatttttcaaattattggaccttaacaaatacttaatgtgcaattaattgattcctttgtattcccatgccttcttttatatgtttccttatagtacacaaaaccacattattgtttctttacttgtgtcattccaccctggaccattcctatctaaactataacattatgagagagagagagagagaaaacaatatgaaaatataaattgattaatcaaaaaaatttaaataggacaaatcaggaagacacaagagagattttaaaattattcagagaataccacaatagctgtaccaatatattttaaaacttagatgaaacggacaactatctcgataaatgtaaattaccaaaactgactcatgaaaaaatggatattatgaatagagcaataatcagtaaagcaattaaaaagacagttgataatttttatttactgacaacaataacaaaatttcaggtcctgatatttttatggtgaattttaacaaattttcaagctcctcctcaaccaattctcagaaggtttaaaactttaacaagaaaacactttctaacacattttcagaagctgttatagcatgataccaaaaccacacaagaaaattatagaccaatctcacttacaaatatacatgcaaaatcaaacaaaatcttagtgaaccaaattcagaattaataatagcaaacaagcaaaatatgttatcatacgtatggcttatatcaggaatgcaagtatgtttcaacatcagaaaatacttctccacattaacagactaaaggagaaaaacgcttgtttaattatctcaataggtttttagagaattttgaaaattttataaagttatgcgtattctgtaaaattgatgaaatccaaccttgatttatttttaaaaattgcctttcctatagaattataggtaaaggaaacacatgcatcctcacagagctacttcaaggctaagttacttcccataagtaacgtatcctgtaatgtgtgcttggcacatattcaatactaaacaaatatttgcaaatcctcaaaccacttctcgctcaaataacccacctttgtcttttgcctttatgttagggttgattttctcaattgtatcttggagatcctttggtgggtctttcagcaattaccctgaatttgcttttctgtttacaattttaattcctgggaactctttcttgttctctgactgcacccttttcatgagagttcagccatcaatcctccagaaccccaccccccccgcccccccaaaaagcaataaagatgtctaaaagcttccttctgggctttcgaatgatgtttaccccaggcatttgttctattcgttcatcacccattttccctacaacttgcctacacttgatatcagatttttatttattagtcacctatcttcttcattggcccattttcctattttgccactggttgttctcaaatgtgttatgattcctggttgtacagtcaagtggttgataatcttggatatacgataaagatttgctctgtagctgtgtgtaagcctatataaaagcttttgtatttttcttcttaaaaaagacaaaagatggttgggaagatccctccagttcaccagttcgaggctgcagtgagctatgatagcgccgctgctctagcctgtctgtctgtgaaaaacaaggggggcggggggcgggggggaagactggagatgtaaatctcccgcagggccctacccgtatccgcaacaggtctctaacaggaacagcctcaggcctgtgttggaacaaggtaggttacagaaatctggaagccagatctgtaacttcagggtaaggactggctctcagggctgatcccccgggctgggtgtcccagaggcacccgcccccgccccttccccaaggcaggccaggacaccttcactcctctccttaggctccccacccccttctcctccccactgtgcctcctggagtagcggtggcggtgccacaggggagcggggcggggcgggctctgagggcaagggggatgggccccgccggggtcactggcggccaccctggaaactcgacgcaggccggcccttctagtgaatcgtcccagccacagctggcctcccagccgcgcttggggcgcctcggggcgcgaatggtgcaggttggggagactcaccacgcaccgtcgggggtcggtccggttattcctcaccgctcggctccagtgggcgcgcgggcctctcctcctcagttcctgcgctgcagtccctccctcacccttcgcagcttgggaatccaactgtgtcattccgacggagcgccgtgaggacctccgagggtgttagcgccaagtgatctctgtccagcgctctgaatatccaagtaaaggagttcaatgaagggcgggtcaacggaggagaaaccgtgactctctcaagggagcccaaggcctccttgtctaattagtgacgcgccaatggatggaggctcttcccaccatctcttcccagcatccagtgacaccaccgccaagggacgggctcggcggaacctgcaggaaagaagcatcggctgagcctgactgcagcgctgtgaagagacaggggaggggatcagtagttggtcccgcgcccaccccctgtttccgcgaggggcggagttgactggccatgcaggcagagggcgaaatgtgaaattccactactcctaccgtttttccctgacccgatggggcggagtgtcgtcaggctaagttccctggcggtaaggtggggagattgaggcgcacacctgccgaacggtaacgcaggattagctaaggcgagctcaggacagaagcctcccgaggagcaggagggcaaaataataaataaataaataaataataaataactcactccttggtctttatttgcggcaggaattcagaaggtgaaagcggggccttaggatctttctgaccttttgggttttaagcaggaggtgtcagaaatgttaccacagggctagctggcttgtggccagcaagcgttcacaatgccctcgatttttcatccctctctgtgggttctttttttcattgtaaggcagaatttctacgattgctcacccactcagagaacctgagctggtttagaccaggtgagacaggctaggtttaccctggtgatgatgtgttgttgccatggcgatcctgcccagtaccagaggccctgcagattcagatgcttggtgcctgtgcttggctgaggggccaatgggtgaagctgccatctgcgggatgatgactgaagcctctaagtcagaatccgcccaggctgagccttagggcagctccatggagcctcggctggcctgggatagagagtccaccactgtgccagcccccagccactgcctaggtcctgtgctgagagccccttgtccagggaaatggcgtccagtggaaaagggaccacccccttgcccttcactcaaggcaggttggtgacaaccctgaagctaatccgttcctagaggagctgcttctgggtccgagttttctctgcagcagagcagctccctggatgggatctgttcaaagtccgcctttcacgcggaattttccgtccttgcaattttccacctccaccactaggggatcctctctgaccgcctcatgccggctctggcctctgagcaggggtttctcttctgcatgtgcgaccttgcgcatgcctagtggccttttgggacctagagctgctccacaccccgatggggttacagagtgcctcgcctccactccaccccaccagggttccttccctggctgggatgggatttcagaagcgccgaggaacagcccagacaggtgtgggagagtagccaaggcccctgtcccggggtggccaggacagcggtggcctcgcataggacctggctgggctgctgcaatcagtgtcctgccccttggagagcaacagtgaaaacaacaagactatcttcacccaccttaagaaagaacagaaccagtatccccaactctgctgtgtatcccaacccaattccattccccaccccactctcagtagccaatatgcaaaatattagaatactcttactgttattattttcaaccacactctgcatcctgaaaaaccatatatttcgttatgtgcttttaaacttcttgaaaatgaaatactgaggctgggcgcagtggctgacacctgtaatcccagcacttcgggaggcggaggcaggcggatcacgaggtcaggagatcgagaccatcctggctaacacagtgaaaccccatctctactaaaaatacaaaaaattagccgggcgtggtggcgggcgcctgtagtcccagctacttgggaggctgaggcaggagaacggcgtgaacccgggaggtggagcttgcactgagccgagatcgcgccactgcactccagcctgggcgacagcgccagactctgtctccaaaaaaaaaaagaaaaaagaaatactgaattttcaaatacttgctttttttttcggtcaaaattatgttctcaaatttcactcctgtagatgtgcgtggctggctgtagtttttgcatttttattattaggtattctcctgttgcattaatatgccacattttatttctctcatgtttttggtgaccacttggggtgttttttggttttgtatttttgctgtatacatgctgccatggtggacatacctctttatacatatttcctgttgtatgcagacacaattttaggatgtgacatcttcagcttttctattgtgtcgtgtgtcttttccttcgtgctttgtgttatttacatattctggacacagattctttgtcaactgtatgtgctgcacatctctttcccagtttgtgtcttcttcttcttttttttttcttaaaaaaaactttctttatagtgttttttttttctttctttctttgttttgttttgtttttttgagatggagtcttgctctgtcacctaggctgaagtgcactggccgatctcggctcactgcaacctccgtctcctgggttcaagtgattctcctgcctcagcttcccaagtagctgggattacaggtgcctgtcaccacacccagctaatttttgtatttttagtacagatggggtttcaccatgtttgtcaggctggtctcgaactcctgacctcaggtgatccaccctctttggcctcccaaagtgttgggattacaggcgtgagccacagcacctggcctgtgttctttcttaagtagatgttacttttaatataatagaatgtatcatattttgcttttatattagtactttttctatctaattcaaacacatccccaagggtctttgtgtgtagactgaccaatttctcaagaatcatgaatgaatactgcttctctttccccaatttatctgtaatgctacctttattataaagtttctatgcatgtgtagaaatagttcctgatttttcactctgtgccaccagcataccaatagcacgctgtcttaaatattaaatagcagagctttatgagacaacttgatgtgcagtaggcaattgcccccttgttactcttcttcagggttctttgttgtaccacatgaattttagaattggcttgtccagctaaaagacaactgcaaggattttatttggaagttcataattctatacataatttggggaaagtattttcataataccaagtcttcctattaatgaacacagactctctctctctctcccccacccccacctgtttagttatttatatctttatggtctgttagttattgtttattgtctttcaaccaggtttcatgtttttctacatagaggccttgcatgtgaaagtctttcttcctagcttgctattacaaattttttttaattgcactttttgggtacagtggcttgtactgtaatccccgatacctgggaggctgaggcagatggattgcttgagtccagaagttcaagaccagcctgggcaacataatgaggtccctgtctcaaaaagtttgttttaaaaattgcatttgctgttattcaacaaatgtcattgtgtctcatatatggatttttatatctgataaccttgttcaacaatcttttgattctaacaatatatcagattcttttgagttttccatatagacaataatgtcatctgtaaattataattgtttcttctttgttatttcttggaccttttattttatatttttgtcttgctgcaaggcaatatccctctatatattgtggggtcttttttctcataaagtggggatggtgaacacccttgtcttgctctctgattgtataaagcatgctttctgtagcattttgtagacgctcttttttagattgaggtaattcacttttatttctggtttactgagtttttagcataaattcaggctgaatttgagctaaagctttttctggagacatcatttgaaaaattcatatgatttactttctttaagtcaccaaagttatgatttacattgaactgagtttctactgtttaactgtattcttgggagaaaacccacttgtcactgaacaatatctgttttatttactgctgtcttgtgtctaaattttcttttaggattttttgtatatgctcagattagcctgttattctcctttctgtatttttttctggtttgggggtcaaagttataatagcctcacaataagagctaagaaaccagccctaatggaggccggggcaggaggtttggagttcaagaccagtctgggcaaaatagtgagacccccatctctatgaaaaatagaaattagccaggcatggcagtgagtacctgtagtcctaggtacttgggagggtgaggcaggaggattgcttgagcctaggaatttgaggctgcagcgaactatgattgtgccactgtactccagcctggatgacagagcgagaccctgtctcaaaagaaaaaaaaagaagaaataaaaaggaaaagataaaagagctaagcatctgtttccttttttccattttctgggagagtatgtgtaagactgtaattaactgtttcttgaataatgggagaactctgtaaaataatctggctttggtgttacctgtattggaaggatgaaaaataccaattcagtttcattattggttgatagggctactcatgctttttgttttgttttgttttgttttgtttttgagaggaagtctctctgtattgccctgttgtccaggctgagatgcaacgttgttcacaggcctgatcctggctcactacagcttctaacttccgatctcaatagatcctcccgcctcagccttcccagtagctaggactacaagcatgcagcatcacatccagcctcttttcctgcctgacccagttctggtttcctttagttttctaggtgttcatccattttatctaatgtttaatgcatttggcataagggtgctcagtgtcctttcattgtctgttgtctgtaactgttgccattttcattcctatttatgagtactggcgtcttctctcactttttcttaataatcctgctggaactttgctttttaaagaacatcttttgacttgttgattcttttttcatacatattaactattttcttattttttgcctttatatttatttcttttcctgtttgaaacattgctcttttcttactataaaaatgggtaagtagctcatgaattaccacctcttttaaaaatcttttctactgtaagcattttagcagtttacatttgcccacaagtaccacttcagctacaccctatgtgcttttacataaagtcttcatttttggtaagacatattctcaaattttaattatcacttgtttttaaatccatgatgttttatttgaaatgttgtttctaaagatacattttctggttatacttttattcttctaatttagcacagtggccacaaaacatggtctgtgcagtgcatacaatcgatgagtaatttctgagctgtagtatttggcataatatatggcaaaatttcctaagttttccatgtgtgctttaaaaaacttccagtaaaatacataaatctgttagatcaagcttctcacattgttcaaatagtctatatgtttactgattcatttgactgcttgatttatcaattacaggtaggaatgtattcaaatctcctattaaagtgtgacactcaagtggctttttaaagacagagatgccaaaccaatgaatacatgattttccccaaagcctgcacaaattctctaatgaaattttaccatgaaagtttgtttaattaaggcttactaaagcagtatgttgtcttttactttttaaacagagaatatatattttaatacatcgtttaagtttatgattaattatctattactgaggataagaatctttgcctgtgctcattcagcatttgcacttcatttatgatctgccttctcatagcttctgttaatttttatactagagacatttatttgtttgtataaatgttgaaggtttttttttgttgttgttgtttttgagtcagagcctcgctctgtcacccaggctggagtgcagtggcatgatctcggctcactgcagcctccatctcctgggttaaagtgattctcctgcctcagcctccagagtagctgggactacaggcatgtgccaccaagcaaggctaatattttgtatttttagtagagatggggtttcgtcctgttagccagggtggtctcgatctcctgacctcatgatctacctgcctcggcctcccaaagtgctaggattacaggtgtgagccaccgtgcccagctgggttttttatattataaggagatgtaatagatagatagatgtttcaaagatagtcaaatgtttttaaaatttaaaacacttttttacaggttgactttcaccatttaatttcatctatgtgttttgccttagagaaattttaaatgctatgtagatctcatgacttataattatgaagcattttgttttctgttttccacgaaacttagcttaactttgagcatataatagttgtaaaggtaggagagtaacactgaaaaaaggaattgcataaaaatggcacattttctgtagagttgtttatcgcctgaaaataggccccatttcatggaagtaagatgatcaggctcaggtccccagacgaaactcttggcatggtttttggagatagtccagggctcagtactggctctatcatttgctacttctcccaaagtaaccaatatctcatccaccctgagcccatttccatatctctaacatgaggataatagcatctaccttacacaccaagtagagggatcaaatgtaggaactaaatcaaagtaccagcactgaataacctacatcctcccacttcccaaaaggaagagagatgtatcccctgttgacaaacgagaccattttgcaggagagaaaggaaatgccagttcacttgcaatgtaaacatgctctctctttttagggatgtccagggacctgagagagaacccatgcttaccaaagagtttctagttccagacacacaggactcgaagggtgacaagtatggttttcagggtccctgaatccacccagtcctcacagaaactcctaaaagctgtcgattgacagcgttgagttcacagctctggtcctcacatgctgatactgcttgtgatatcgaacccgacaggaccccacatcacaattgatttaccaactacaatataatacctcctgaatctccaaattggctcacccaggaacaaaggcttggggtaaaactggattaggagatataagctctgaattttctgagggtgagacacacaaggattctaagtgacacgccacagagtaacgggtctgtgactggaggacccacagatttgtcttactggagacaccacatgcacacaaactccatccttagctgtggaaacaagggtcttttgctatcttagccgaattctgggagtaatttttggaggggaggagatctttgggattgcctctttcaggccctttacaaaaatacctacttcttaaatggtaaagcttacactaaactgaaaaaattacatccttggctttttatgaagtaggtgttggattgaatcactactggaagaagtatggcatcgcaaattctaagcagtggtcaaaggatggatctgttaaattagaaaaatctctaaatttataaaaagattttagattcctttattctaaacaattgacctatttgtactcatgggacaatcaaatttcaaaggagatatgtaacgatttcatggcttgcattaaaaatccttctgataaaattaaagataaaaaatctgaccccctgccaaaaaaatcttttgaagttcatactgcctgctttcaatattctgtgggattcacaatgaaaggtgccttatattgtggcctagcttcaagtttatgccttcgccaccatggcctgggttcaattcccagtcagggccccagcgcctttggtttaatgtttgcgtggcatttgacttttttacctatttagtattggtgagattacctttggtaaaaaaaagtttaaagagtggaaatcgcaattctttgtgttggctaaaatctgattataagagatctggaaggttttatttttctttttcaaagagctctatggtcagaagtcggcttcatgaaaagctaatatttaattatatgtacatacagtctttctggattttctcttttgcctcctgttttgaaaaatatttggatttgagtgaaactccgttttagaaattaattgcttggtacaatatacccatgtaactaccctgcacatgtaccccctgaatctataataagagttgaaattttgacaaaataaaattagattttgaattaaaacaaataggtgcttggttcctctgctcacttctttttaaaaggaattcctctcccatgtacttcttcttttcccttctttaccttccttttggcatctttggtatcacatgaagggatctagagggaattttaagtgactctgaaattccttgagaaatacacaaaaagatcccactcaccccttttgggggtctcctgttctccttgtggagtccagagtcagggacaggctcctccaggtctgcagctctgctctcttttatttcatcttggctgattgctttggttttgtgagtaccaggcattactttgtactgtgagagacacgtcctttgtgagtgcaacggctgctgggtcactggtgagggctgcagtttggagatggctgagagccgttgcaataaatggttgtgattgcagggggctccttgtttctttgcaagtttagatgagaaaggtgcagtttggacacagtttaaaggctgtgaaaacaccaccaatgaatatgatttcctttggggatggtctgattaaaagtgggctgattgttgctgtgctactagccttgaagacatgtttctacagcattgtgcagtgtggaaaaattgtgtggcttggtcttgtggcatgtcccttcttttagagacctcagattcaatgtgaaattcgggatttttgattttcaaagatctagatgccctgccttccagatgtgcctactcttcacatattttaaaattagatcctataaactgcaaatactttgttggcttctgtgagatcagaggtccagttagaaaaggaagacagtttgttaaaattaaaaactatttatctaatctaactagattggcctccaaatatgactttctgacattcagctggttactctgaaaagatttctaaatctcttgaggctcatctatatgtttccttgcaaagaaaaaaaaaaaaaaaaaaaagcaagcccaagcactagtaagaaaaagatttgcaatgtttcatgaaaggagtagatgagtgaagcatttatttgtagatactgggttggatacctgtgcaaagaagaagaggtcaataataaaaattgccaggggatttcttggaacttaacaagctgaattaaatatagaaatgtcaggaaatcaaggcaggaaatactcacttgtggttaggcagacagggcagggttctgagcttgagatggagcaaacagttgtggtgggtgaagttcacatgctttagagctcagctgtcctagtaaagaagcctaagagtctctaaagctcttatgagaagatggattttttttgcctagattaaaaggttaaagaattgctttaagttggataaaataaagctaaatgtttaagcaagttgtgaaaggtttatgaaaaaattaattaaaatatttttgtgtgtaaacatattgactaaagttgaaggggtataattcagcatttctgtaaattgagcattgaaataaaaacacaatgggtttctcttagagcactaacctgctctttaacaaaaattgtaaagggttatagaaagtctataaaaatgttaccttatggtcaaacattaaaattgggtaaatatgtctatcaggttttattaagaattaggtttaacattaatagtacactaatgtaaaggtgaaatttggcttatttggtacaaaaatcatacaggaagcattgtgaaatataaaatgatttttagctttctttgggctatatttctataaatatgttattgatgagggttccaaagttatgggagactcctataattctgctatatctcagtgtacattatcagtcataattataattgtcatgttaaattattgtgggccacagaggtaacagatttccttgtcaattgtgtctttgactatgactaccctaaaacgttcagtcacccatatacacatgttaccttgttttggccctctttagaaggtaattttataatcagctataaagccctaacaggtgctcttaaatgcaaattttgataactttggagattgtgacatcagaagagaggaaaaatgttcgggacacttggagagctaaaatgttcattgatatcaagcaggacaggaattaactgcatgaagtgaactaataggaggctgaagtgatctttttgactttttgcttaaaacgttgctgatcctttgttttgcttttcagagtcaaggcaaattttcttttgagctattgacagcttttaacgattaatcaaaatatactcctatgaacaccatttggagcattatttgtttctctctacccgatttccccagaatttggaaactatttgtgggtattcttaatttatggcaatatagttatttgcataagtgcaataagaatgtgttttctttggtaacaggacacaatttgaaaaactggttattttaccaaggttttgaccagaatgctgtgctttcctttaaggaatcaaacttgacttgtggagctaataaagcctttggaaaactgaccttatatcctgtgaacacagtccctgtacagggttactgatctgtgggaagaaaagaatgtcacattctgacaggtcaggaatcccaagttatcttgaaacttcaagaggacaggaattcacccaaccatatgtatttgatggtagaaatccatggcaggggctcagctttaaaaagtcttatctcagattccttctataaaacaaagtcccattaaaaccaattttaaaagcctatgtgaaaaataattattcttgctgcacctcgtacaaataaagtggcaaagcataataaagcaaattggtcctgtcgtaatttgtctttagtaaaaacgggaaactggggtcgggtgcagtggctcactcctgtaatcccagcactttgggaggctgaggtgggcagatcatctgaggtcaggagttcaagaccagcctggccaacatggtgaaaccccatctctacaaaaatacaaaaatgagccgggcatgatggcgggtgcctgtaatcccagctactcaaggggctgaggcagggaagcggaggttacagtgagtcaagatcgtgccacttcacgacagcctgggtgacagagcaagactccatctcaacaacaacaacaaaaaagggtaactggagagagggaagttatgtttcaaaaacttttggaaactatagtacacctgtttttaaattctagtctggcattcagtttttattattttctacagtttgggttaaattcgtatttctctggctacaagtctcctaaataatcttttcatttgtttcctttttctttccctttttccccatttttcttaattggaaatcactgaaacctaagctgtgctttcttaaagccctgtgaactgaagactagacaaccgaaacttctgaaggaagtagcagcaacctatttatatgtgttgctgttgcctactattatgttttagcaggtgctgcctctacacccccgaaacagagagtgctactgggaacaaatcgactttttccactccagtgctgcattcggtgccccataacgatgaccccctctcagcaggaagtagccagaaagattacaatgctccatctccctatgattcttgtgataaataaatatacaagcatgatagaaatcatgcgcaaattgacagtggggattgtggcaggccagatttcactaatggaggtccccatcacaactacttcagtactgactgagtggttaagttcagtatcaaaagctgaaagtgccagcgcctttctacaaaggctagaatgtaacaaaagcccaccaagggttttacctaggcctttcctgggccttacagcatgacaaaacaaagaaggaattcttaaccagacctgtttaggattaaacaaatttaattgggggtctgaagaaactcgccaggcctccacaaacaagttcattgggggtctaaaggaaccccccccaaacctctgtgattgagcaggagacaaggtcagggtaattgccccagcacctggactcatttagatttaagtaaatgtactgaggctccagagaaaggtctccaagacttagactagagttacagattaaaagaagttaatcacttatatctttagataaatgcacactgacacgtagacatacatcttagaaaatatataagctctggaaaaccttgtaatttacagttggtctggagatattttctgggccttctctctgtaaccggttccagaaataaaaaactctcttcctccccagtttatctgcatctcgttattgggccgtgagaaatagcagccagaccctgagtttggtctgggaacacactggctgggcttcctgcctggcggtagagcttcactgtcctccttcccagccaaaatgtggcccttgaaggcttcctccccaactgaccggttttgggttctaggtactcagggaacaccgtcttcaaggaggccattttcatactgttcctggtttgatttttctgaaattaggaaatgccccttgaggcatccaggattgtctttatttcccctgaagcttcccctcctgaagaaaaaagttctcaaacaccctcaggactcaaaccccaagttcaccctgtgaaacattcccatttcctaaacccaggcaggctcatggccctcagcctctcagaccccatggaaacctcctcccccacttcacgggttctctccatattgagagcctcccctcctcggcacacaacccagagactcaccccaacatgtgtagcaaatcaccctggaaacaatcatggctgaacgtggtagcccatgcctgtaatcccagcactttgggaggcccaggaggtggatcacctgaggtcgggagttcgagaccagcgaggccaacatggtgaaacctcgactctactaaaaatacaaagttcactgggcattgtggtgtgtacctgtaatctcaactactcaggaggctgaggcaggagaatcacttaaacctgggagacagagattgcagagagccaagatcgcaccattacactccagcctgggcaagaagagtgaaactacatctaaaaaaaaaaaaaaaaaaaggaaaaggaaaagaaaaaaaaaatcatgaggcaacattgcatttaacaatattttatttatcaaaagacacttgtctttctcaggtaagtgaaggtctagagatgaaacgagtcccgatgtaaattgccccatgggcattgctgagatcacaagatcatcactgcagcatgcagcacaatagtaaatttctcaggatggaagttcaacaatccaaaaggtagtattttttttcatgatgctcagtccatcatacgaaataaaaataaattccttttcatgatcatccattcagtagaaaaaatgatagtaaatttgttctcatgaagatttttaccgtaacatataggatttatcgttattattattattctttgttttttgtttttttgaagcggagtctcactctgttacccagtctggagtgcagtcgtgcgatctgggcacactattaacctccacctccagggttcaagcatttctcctgcctcagcttcccgagtagctgggattacaggcatgcgccaccacacccggctaattttcgtatttttactagagatggggtttcaccgcattggtcgagctggatttgagctccggacctcgggtcatccgcccatctcagcctcccaaagtgctgggattacaggcgtgagccaccgcgcccggcctcaatttatcattattcacgcatccacaaactgggttcttatattttgtacgtgattttttccattgaggagagatatctgtgcatattcatgctgctcatatttcatccacaaactcggttcatatttcatccacaaacataattttttccgttgagaagagatacttgtacatatttatgctgttcaaattcacatttcatcattcttttacaagaaatagataatgtattttaaggttttccagtggtattacagatattttactgggtgtatagatagaaattaaaccaaacttctttgttctggccgccagtcatgcatcctgttttcaacatagttcacatacaactggttgtgtaaaaatgaaattattttgtttagtacaatcatcaacagttggttgattagatttttaattatcaagttaatcattgtcattatgcttctcatcgcactcgtcattaattgctgtgggaggaaatttgttatgttccctatgagagggtgtatcacaaattcaaataagaattcaacgacaatggactgtataaaggaaataagcaagtccatggaaaacatatttttttccggaaaggattaaaatatttttaaaaaggaattaaaaaaaaattgggcacggtggcaaatgcctagagtcccagctgctcaggagatggagacagaaggattgcttgagcccaggaataagttggaggctgtagtgaacagtgattccaccactgtactccagccagggcaatagagggaaaccctctttctaaaaagacaaaaagaaacaaaacaaaacaaaaaaacaccacatcaaaaaacccaacaacaaaatgaaaaaccaaataacagcaatacaattggagctattcgatccaaagaagtaaatgaaacataaagcaaataaaagagaaaagctaatacctgtgtcctgcaggactcagtccaagttctgctctgactccctcctggtgagccaccccttaaaaagtcacttggggcggggttactttgacagacagtcttctgtcaaagagggaggcggtaaatagcacttttttttttttaatttaacgcctttccaacaaattagcggctatgttgtctaagagtgcaaatgtcagaggtgggtacaggcagcaagaccctccccacaggggcagcagaaggaggaatgactaagggaacaagactttagtgtgctcaactacacaggacaggaaacagatgctttttacaaaagctggtggacttgaaggcagaatattttcaagttcctgtaactgcgaactatgacctgtagcctgtgagagtgactttctgtggcaaaggagcttttgtgaatgtgaggaagttaattatcttaacagtgggaggttctcccggcttatctagctagaccctcgtgaaatcccaagtgtccttaggaaggggaagcagagagagatttgagtccagaagaggaagaaggtgatgtgaggcccagtaggggaacaaagggcgatggcatgtaaacacttagcccccagaagtgggagagggctggggttcatcacaccagaatccctaacaatcagccttattttaattacccttgaaatggaaggaggccttagagagccagaggcttggaggggcaccctctgctgcatacacagatcccaactgctgtgggctccaaataattgcaccagggaaatcacaaattatcaaaaataaaggatgtaaagcttttaaaaaatattaaaagcccaacaaataaaaaaagttctaaatctataaaattgacctcagtctgtatatttagatgagtcatgtgtatatagcgtttcacttcaaaatatatgataaatctctcattcattggcttaaaaataaacacttcaatcaagtctttatcagaaaaattgaaacgttaactcaattgccttttagttcatgtgactttacaaaacttaaaacaataaagtcagttttaaaaattattagtaaagtaaaagaaaaatatcttcacaatgtagacattttgtccacatgagacatgtgaaatattgccattactaaatatttgcaggtcaaaaactgtttccaaaacattttaaataatcatctggcctgtctgttttagagcattcaattctagctgaggtctggggacatgtgaaaggagccacggcccgactccgtgctgggaagagtcagacattttccacagctctgtcctttgctgtgggctctgcaactcctaccaattaaaattgcttacgtttttgttttatttttactaaagaggggttcctaaaagctaacattatactgagtatatgtaactaaaactactaagaaaacaatttcacaattatacaaatgtgccaagtaaatgaaaaaataaactgtattttaataaaggttataaaaagaaaaacatatagtggtgtgaggactgtctcaggtcttcactgagcaagggatcatgacattctatggcggacagctgaccttggctttctgctcctcttgattatgtctactaagtgacatacttactctttttccacctgtcttgcctctaagggtaacaggttttatgagatccctcctagtgctttgcaggtcagcctccctttgctgcattccaattttactgcctataccctccagctggcttttgatgacaaaagtcctggtcccagccattctcagattctgtcatccccgtgggcactatggagctcagcactatgggaggttccccaaaaatctcgttttctatgaggaatggccaccacctgcatctcagtgatgctagtgacccctttcctactcctgtgctcactggtcctcatgaagatcctggttggtctgtagccccctatttttcctattaaagagaaattacagtaagacccatttgtgtgcaaaatcaattttaggcttattacacttggcctgataatttgcataaaatgcagcaagaattcatcggccatataggctacttttgagttaattttcctgggtttttacctaaaaatatactattttggttagagtcttgtgaaaataaccaatgtgttcaattgttttattttaaaaggctcttactgaacactataaatatgtataagttgaatatacaaactatattgtcataaaatcacaacccaaaatgtggagaacgcagagggaaaggtaaatttgctcgcaaaaacatacttcacccaaataactggaaaaaaaaaaagactttcatgacccttctttaaccagagcagcagctttcaaacaaggtgtttgccttggaaatgccattcacaagccaaacggcccttgagagctgtctgtcaggcactgtagaatctagcagctcctcacagagttagaaatagtttcaggaaagagattccctgcttttagtaactgcactttatattcccagatagcgagattgtatgtaaaccatttttatcttattctggaactcttttgggtactttttttttttttttttaaatgatggagtctggctctgttgctcaggctggggtgtagtggtgcgatttcagggtatgagaaaatgcagctggacctggctctttccaggaagaccctcacagccaaggagtccaaagcctggggttttcatctaattccagtgtgactggggtaggagcagctttggtgctgggtgtgtgtgtgtgtgtgtgtgtgtgtgtgtgtgtctatgcctgtgtctgtttagggtgttaggctcgtggttgtctagatacaaatgtcccagggctcaggagccccagggttatgtcaggggcaccagatgaaggtgtcaacagaagttagggcacaagggacaaaggtgagagcaaggttagattcatttaggtgcaagaaatcatagagggaggagggagaggaagccctcctgctaccaccgaggaagaagcgcagcttaaggcagaaagcctgtccggagaggaagtgagtttgagggcagggctctctgggtaaagtacggtctgggacaccagcctgggggaagggtacagaatgcagagtggcctggcgtggggactaagaacagaggagagcagctttcactgggagggtcagtgttttcagtgtccagcactgagcaaggtgagatttgggcagcttgctgtgaaataaggtcaggctctggcattgtccccattgcgtgtgtgtgtgaggggcactttgggagagtgaactctccacctccatcctctcatacgtccttcaaccgagcttgccagttaccctgattccaaggagatctatttattgttgacaatactggatcctagcagaggctgggtaggagcctgggcacaagcaagtggaggagggggcctgggcctgaaagacctgggaggtttgagagaggacacagcccacagaatggagcagatggggtagagtcggcaagcattcagggctcctagtaagttggacaatggagaccctgaaagatccagtaaaacggggagaacaaacaggtccccaactcacatccttgcagtgcctggagcttcagactccagacaggtggggaaggaaaattgagggatgtgaacatgttggagaatgtcgtgccctgaagaatgaagaaaaggggggtgaggaatgagagcaggaacggcttccagtgcctggtgcccaggagaactcagaaaatgggtgtggtggagaggaatcgaggaaccggaagtggtggaagtgtgcagggcccctccgagatcactgtgactgccaggcgtcctccctggctggagagcttcactgtcctccttcccagccaaaatgtgtcccttgaaagcttcctccccaatggactggttctgggtcctatatatttgaaggggtggcctgcctctccacacctgtgggtatttctagttgggtgggaggagagacagagaaaagaaataagacacagagacaaagtataaagaaacaacagtgggtccaggggaccagcactcagcacaccaagggcctgcaccggcaccggcctctgagtttcctcagtttttattgattattattttcattatttcagcaaaaaggaatgtagtaggagagcagggtgataataaggagaaggtcaatgaaaaacatgtgagcaaaagaatctatatcataattaagttcaagggaaagtactatgcctggacgtgcactcaggccagatttatgtttctctccacccaaacatctcagtggagtaaagaataacaaggcagtattactgcaaacatgtctcacctcccgccacagggcagcttttctcctatctcagagttgaacaaatgtacaattgggttttacaccgagacattcagttctgaggggcaagcaggagacagtggccttcctccatctcgactgcaagaggctttcctcttttactaatccacctcagcacagaccctttatgggtgttgggctgggggacagtcaggtccttctcatcccatgaggccatatttcagactatcacatggggagaaaccttggacaataccccgctttcaagggcagaggtccctgcggctttccacagtgtattgtgcccctggtttattgagactagagaatggcaatgacctttaccaagtatactgcttgtaaatattttgttaacaaggcacatcctgcacagccctaggtcccttaaaccttgatttcatacaacacatgtttttgtgagctccaagttgggtcaaagtggctgggtcaaagtggctggggcaaagctacaaattaacaacatctcagcaaagccattgttcaaagtacaggtctttttcaaaatggagtctcttatgtctttcctttctacatggacacagtgacagtctgatctctctttcctttccctacatatattcatggaccacagtcttcaaggagtccatttcctcactgtttttggtttgatttctctgaaattaggaaatgccccattgaggcacccaggattgtctttacttcccccagagcttccactcctgaggcaggagcttctcaaacaccccccaagactcaacacctaatttcaccctctgaaaccttcccatttcttaaatccaggcagggtcatggtccttagcccctcagatgctgtggagaccttctttccctttcatacattctctcaagattaaaagccacccctcctcagcacacaccccagagactcaccccaacatgcattgcaaatcaccctggaaacagtcataagaccacactcatttaataatattttatttatcaaaagacactctttctcaggtaagtgaagttctggagaggaaaagaggagtcctgatgtaaattgccctgcaggccttgctgagatcacaaggagattgttactgcagcttgtagcacaatagtaaatttcttctctggatggaagttcaacaatccagatcgtagtatattccttttcattatgctcagtccagcaaatgtgatgataacaaattccttttcatgatcatccattcagcagagaaaatgtttgtaaatgtgttttcatgaagatgtttaccataacatacaggatttaccattatcaatgcatccacaaactctgctgttgttttttatacataattttttccatcgagaagtgatagttgtacatattcatgctgttcatatttcaaccacaaactctgctggtttttttatacgtaattttttccattgagaagtgatacttgtacatatttgtgctgttcatatttcatgtttcatcatccttttacaataaataggttatattgtattttaagtttttctaactgtagtgcagaaattgtactgggtgtatacatagatatcaaaccaaatttacttgttctggctgataatgcatcatttatttcatagattatgtatttctttgacacatttcacgtacaactaattgcataaaaatgaattttcttttagtatagacatcagcatgtgcttaattcggaatttaattgttgagttaaacatcgtcattgccttttccgttgttattaattgctctggtgggaattttgttatctcatacataagacagtgtgccacaatatctcttaaaatttcaatggcaataaactttatatttaaaaacagggaatctatggaaaacacatttttttctaaaggattaaaatatttttttaaaataattttctaaaaagttaggcacggtagcaaacgtctagagtcccagctactcaggaggctgagacaggaggattgcttaagcctacgagttgggggctgcagtgaactgtgattgcaccactacattccagccagggcaatagaagttaaccctttttctaaaaaaaaaaaaaaaagaaagaaagaaagaaaaaaagcaacaacaccaaaacctcaccaacaaaatggtaaagaaaaaaaaaacagcaatacaatgtaagctatttgatccaaagaagtcaatgaaatttaaaacaaatgaaagggaaaaagtaatacttgagtcctgcaggactcagtccaagttctgctgtgcctccctcacggtgagccacccctttagaagtcacttgggtcataagttaacccgataggaagtgtcctggccaatgaactagggaggtggtaaatggcaccattttaaatttaaattcacggccttttcaacggatcagtagccatgttgggtaagagtgcaaatgtcagaggtgaaaagaggcagcaggaccctcccctagtgcttgggcaacagaaggtggaatcactaaggggacaagactttagcatgctcaagtacacaggacagaaaacatgctttttacaaaagctggtaaatatgaagagggaacattttcaagttcctgtaaccaagaactaccgcctgtaaccggtgaaagtgactttctatggcaaaagcgtttttgaaaaggtgaggaagttaaatatcttaatgttgggaggttcttctggtttatctggctagaccctaatggaatcccaagtgtccttatggagcggggagcagagagagagatttgagtccagacgaggaagaaggtgatgtgagtctgggtgcgggacagggggagaatgatgctatgtggggatctgggctggggaatgacttagctgcatgagcggagtgacttagactcctgaactagaagaaatctagggctcatcacctcagcagccctaaccatcaaccttatttttattacaggtcttccatcgacggactccctaaaaagccagcggcgtggaggggcgccctctattggacaaatagatcttgactactttcggccctcaaatagcctgactaggcaaataacaaataataataatttttttttaaatcatggaaaatattttaaaaaacaattaaaaagttataaatctataaaatctgcttctgtctgtgtgtctgtatatttagatgtctcatgtgtacataatgtttcactaccaaaatatatgatgaaaccctcattaatcggcttagaaaactaaacacctaaatattttctcagaaaatacaaaaactttaactcaaatcccttttaattcacctgactttaaaaatctttaaaaaataaagcatgctttaaaattattagtaaagtaaaattagaacatcttcagaatttagacatttggtttaaattatacaggtcaaatactgcccttagtaaatattttcaggtcataaacaactcctgtaatcttttaaataattgaattacatgtctgttttagagctttaagttctagctaaagcctggggacaaatgaagggcaccatgccccctctctgtgctggaaagagacattttctacagctctgacccttgcagtaggctttgcaactgctacctatcaaaattgcctacatcctaagtttattattaaaaggagttgcttggagttaacattataatgaatatatgtaactaaaactatttctcatacaaagtatatgaaaaagtagaatgtatttttaataaaaagttataaaaagacatgaacatgtagtttttataaaaaacagtaattttgtctagttttgcagttctaaaaagttatgttaaattcaaaaataaaaaataacaagacaagactcaaggtttaaataagttgtaaaagatttgtaaaaattagttctataaaaattttacaaaaaaaagcattggttaaaatttaaggaattattttgtttttacagaaattaaacattcattaaaaacactctgatacaaggccttaatttgggttcatgtatcagaatagcagggttttcttagaatattaatctattctttaaaagaactatgaatgttatgcaaactttataaaaatcttaccttagagtcaaactgattaaaattccatagattttacgtaaaattttattaaaaattaacttcaacaaaaataaaatttgattttctcctttaaacaaaagttttgcgtaatattaaataataaagcatttttgtttaccttttaaactataaacacacacacacatacacatacaccaacactaaagtcagctgacctcatactgtctttattggatattcttgtttaaaaaactatcttctttggaaaataaagttttttattttaaaccatattttaaattatcattttgactaaatccataacatacagtgatctgtaataattctattttataatatcaagtgttttgaagaactccaggaacagccatgagagaacactgtggtttagtaacactttatttcctcagtttgaaaatagttgtctttcttggggaggccggtttcagcagatgaaaacaagagtcatgatgaaaattacccagcagtggttagtgtgaccataggaacattgtcatcaggtcagcagaaaacatatcagcaaatttttctcatactggcagtgtgtaggggtggatgtttacagttcctgaagccccagtggtcgtgtggtcttttagttttgccatttataggcaacttgtggtaactagctcaattagacacattccttatcacaaggacagagggctttctgtatcctagggttcttgccttggcattccagaagaatcaggtcacacgtggacgtggagaatgagtgcaaggttttattgagtggaagtagctctcagcagatgggggagccagaaaggagattggtttctccctggattggggccgttcagcagccctggctctcctctgactgccccaggcaaaatccacatcgttctataagtcggtgccctgctggtgtgctggtgcctgttgtcatgttcctcttcatgtccagccgcctgtgtgttcctccgctgatgtgctcctctcgacgtcaagcctcctgtgtgtctgactgctagggtcttggggtttttataagcacaggatgggtcttagcaggccaggatgatcttgggaaagacaacattcggtcaggaaaacaaaaatgcctgttgtcatctaggtccgtggggacaagcccaggtgtggagcttttagccagggaccacagcctcctgtatccaacacttcccttcaccttttctatatcattcaaagggatcatgcccttcccatcccagcacttcactttcatgtcatttgccccctctgaagaggtacatctaactgccattagaatatggatgatgaccagtcttagctgcttcctgctgaaagggggcattgttttgggggaaaacggcagtcagattcctcccaggggtctctataataaaagatcgaggtggctactttcaggaggtcctctaatgtactatctggtcccaagtcccatttctgcaacctcctcctgatgtcaggagctgcctgagtaataattttatcctttaggattatctgtccctcgattgaattaggagatagagaggtgtgatttaccaaggcctctcttagcctctccaggaaggcagtgggattttcatcaaatccctggttaattatggacaacttagtataattgagaggcttggtcttagacctacgtaagccctctattatgcacacctgaaagtgtctcctcttccagtcttccatctcattattgggatcccatttagggtccttcactggtgctacttctcttccagttggataatattcgctcccttccctgatgctataggtgatgcaaagctcatccccaaatctctctgctgctggcagagcagcctgcttctcagtgtctatcaggttctgactcaaaagtaacataacgtctctccaggagagttcaaatgttagggtgaaattctggaaagcttctatatatctatcagggtcatctgaacacttgcccagatctcccttaatttgctttaagtcttgtagggaaaagaggacttggaccttactgggcccaaattcactgggcatctgtaggaggggcaagagtgagactgggcttgtttgggatgaagatttctaggaggggccaggtgagaggctgaagctggatacggaggttggggtggacccagaggagcagggcttgagggagctggcacgtcagctgggggtgcgtctgggactcgtgtctttaattccctgggcttgaccctggcagccttccccgagacagcaaacaggagggctggaacaatcctacatgtcagcaaaggtctggattgctttgcaaggtatagaaagcctgcacatttggggcctcagaccatgtgtcctcacatccagagaaaagttctaattgcaggatggtattgaaatgaatggtcccttcctgaagccaagccagtccttcctgtaaaccataatttggccaaacctatgtgcggagggctatgagatgcttttcctctggattctgagggtcaaaacagtcccaatggttcaggatacactcaaggggagtacaagctgggggtggtgaggagaactggctgcccattctgaaagacagggaatagaggtgttcctcatttcccttccttcttttggcaaaaagctcagggtgtgatggggagggaaagcaagcatcttcacttcactttccacctcttacccctgcgccctggcaaccttggcaggtgccggccacaggtacaaatgcggtatgtacccatgaagcagggagaacctggagattaggaattaactgccctcacctatgtttccttttctccctgctgttgaaaaactttgagttccctgggcctttttatcccatgaggcatggcctccttctgtgggatggggttcagtcagcaggaattggtcctgtccatttacattgtgcctgttgcctggctttgaattcctcagacctgctttctctttctagggcctcagcctgaagcttggaattgagtttgggactgaaaaagcatttcagaggctgtttatatccatttagtgcctcaaataagccctgctgaatttgcaattatcagccagcaggggtcactcctctgttaacttccctattagaaacagagcggtggggattctcacttagaaaagaaaaaaagagaaaaacagttaaagaggcaaaaagtggggaatgctgggggaagaaccccttgcttagtgcaagtgggcccctctaatccttataactttcccatccttcccccagttcagaccaggttgaattccttggccatggaaggaaaggttccattgatgcagtgggtgagaagcactctgtagggtcctggctaccatcggttttctcacacccccctcatcccaggcagtggagggagacacttctgcgacattgctccccctgccccttcatggctattgggtgtggcctttgcctgctgcaggcatgcctaggtgctggagctgggagggaaaagggtaaggagaggtgccctggaagccgctcatgcctggggctgtcaaggtggaggcatacatggcacctctaggaaaaattggtctgatttgcacctttggcggctgagccaaatgctcattttacttagtaacattgcctcagcctgtagcaaaactcttaacattataaaggaagagataagatccatttcaaataatgtgtgagagagaaaagagatgaaaggaaaacagagtcttttacctgcaggaaagggagagaagtggcagagttttggaagaaaggcaggcccaacagtttcccattcactcacactcaccttccgagatcccagacgagccaccagttgaaatgggaaaagtttccttgtccccctcacaggaggtggagtgggggtgtggcttgcttctttagtactccgctgctcaaacctctagggaagcatacagactggcaagttgtggggctacaaccccatggcagcatctaggggtagatgtttacagctgctgaagccccagtggacatgtggtaccatgtgctcttttagttttgccatctataggtggctttgtggtaaccagctcaattagacccattccttaacccaaagacagagggctttctgtatcccgcggttgttacctaggtgtaccagaaaaatcaaatcacacgtggtcttggagaatgagtgcaaggttttattgagtggaagtagctctcagcagatgggggagccaaaagggagaatagttttcccctgaagtcgggttattcagcggcccaggctctcctctggctgccccagccaaactctatgtcaatccattggtcggtggcctgccagagtgctggtgcctgttggtggattcctctcagcgtcgagagtttttccctctcaggaaagggagagaagtggcagccacccatgtgttcttgcactgatgtgctcctctcgacgtccaacctcctgtgtgtctgcctgctagggtcccagagtttttttaggcacaggatagggcatggtgggccagggtgatcttgggaaatgcaacatttggtcaggaaaacaaaaatgcctgtcctcatctaggtccaggggcacaagcccaggtttggagccctagccagggaccccggcctcctctacccatcactttccttcaccttttctgtatcattcaaagggaccatgcccttcccttcccagcacttctcttctgtatcaataggtgatgtttttaaaatttcccaactctagtgcaggcatggtactagacatatacatagaaataaaaccacacttattcttctggctggcaagacatagtatttttgccaaattatgtgttgttttgaagcattttatgtacccctggtcatataaaaataaagctattttgttcagtacaaacagcagcattttctggattagaaagttaatcatcttaaaagatcatcacggatttttccattgcactcatcactaattgctttggcaaaaaatttcttatctcacgcatgacaaaatcagccgcagtatctcctagtaatttaatggtgatgatctttataaaggaaataagcacatcaagggaaaacataattttttttaaaaaaagagtaataaaactttttaaaagtcttttttaaaagactgcttttctaaaatagtaaaataaaactccaccaataaaaccaccaacaaaacagaaaagaaaaaataatgatatgatcggagctatttgatgaaagatggtaaattaaatttaaaatgattagaagagaaaaagcaatacctgtctcccgtaggtctcagtccaggttctgctatgcctttctcctggtgagccacctatttaagagtcgcttaaagcatatgttaatccaacaacagcagattaaaaaccaatgcaatctgaactatttgatctaaaaacataaataaaatttaaaacaaataaaagagaaaaagcagtacctgtgtcctgtaggtctcagtccaagatctgctctgactcccttgtggtgagttagccctttagaagtcacttggggtggggcatatgttaattccactaacattggttctggccaatgagtcaggaaggtggtaaatggcaccttttcttcttgctgatttctttcagttcctttggagtctggacattagtcctttgtcagatgcctagtttgtgactactgtttcctatactgtgggttgtgtgtttaccctgctgatatttcttctgccttgcagaagattttcggtttcattaggtcctattgatcttattctatttttatatttttgcgtttgcttttggggcattagtcatgactacttggcctaagccaatgtctagaaaagctttttggatgctatcttgtagcatttttagactttcaggtcttagatggaagtttttatatgctttgttaaagatcaggtgactgaaagtaccgggctttgtttctcggttctctattctgttccattgctctatgtgcctatttttatacttcctgcaccatttattgaataaagtgtcctttccccaattagtgtttttgcatactttgttgaagattagttgtctgtaagcatttggctttatttctgggttctctattctgttccattgctctatgtgcctatttttatacttcctgcaccatttattgaataaagtatcctttccccaattaatgtttttgtgtactttgttgaagattagttgtctgtaagcatttggctttatttctgggttctctattctgttctattgctctatgtgcatattttataccagtatcatgctattttggtgattgtagccttgtagtataatttaaagcctgccttcagatttgttctttttgcaaagtattgctttggatatgcggtcacgtttttggttttgtataaattttaggattcttttttctagttctgggaaggagaatgatgatattttgatgagaattctactgctctgtagatggctttggagagtatggtcactttcacaatattgattctacctattcataagcttataatgtgttcccatttgtttgtgtcaactgtgatttctttcagcactattttgtagttttccttgtaggaaacttacattaacctacttggttaagtatatttctaagtattttacttattaaaaattctcagggaaatgcaaagtaaaactgaggtgggaaattaaagaaaaataaaattaaaaagaaagggaaataagctttcttgtattaagctaacttgtcccagaggcagcaacaggcacagcccagacccaggaaaagtcttgataatattatttattgtattctggagactcttccagcactccttcaatgtagggagaagaaaaacaaattttcctttgttttatggtatgagtttatagattcttgttctctttaactagtaacttcaagtattctgttttatctaagaagtatggcaaaggtcatgagaagcctgagcaggcctgaactacagctctctaggcaccatagtgaagataaaccaatgcaagcctctttagagcaaaacctagataatagacatctgggttgcatagcaacagttatgtgcaatcctgagttatgaacctgttacaatttgattaactgtctttttcctgcctctgtatccctgctttcacaccactgtaagcttgcttcaagctggcccacccccttttgtgaagtgtgtataaaagtcaagtgctgtctttgttccaggccctgtctttggacgtgagtctgctgggcctgagagcactcaataaaagattctcctgttttaacccaaagcctctctctcatcctcctaaatcccacaacaaaaccacaatgagatgctatcttaatcttgctagaagcccataatttaaaagtcagaaaacaatagatgttggcatagatgtggtcaaaagggagcactttgacactgctagtgggaatttaaactagtccgaccactatggtaaacagtatggggattccttaaagaactaaaagtagaccattcattccagcaatcccattactggctatctacccaaaggaaaagaagttattccataaaaaagacacaagaatatggatgtttatagcagccgattcgcaattgcagtgatatgggaccaacttaagtgcccatcaacgaacgagtggataaagcaaatgtggtacaccatggaataatacttgataataaaaaggaacaaaataatgtcctttgcaacaagttggatggaactggaagccattattctaagtgaagtaactgaggaatggcaaatcaaatattgaatgttttcacttttaaatgagagttaagctatgagaatgcaaaggcataagaatgatataatggacttggggactcagggggaaaggttgggagggggatgaggaataaatgatgacatattgggtatattatacactgctcaggagacagatgcctcaaaatctcagaaattaccactaaggaacttttatccacataaccaaaaaccacatatattccacacactattgaaagaaacataaacattattttaaaaaataaagccacttttaaaattagcaaaataaaataaatatgtcttcagagtttagatattggatccaaattagacagatcaaatactgcctttactaaatattttcatgtcattaacaacttctaaaacctttcaaacagttttttgacatgtcttggaaccatccatttctagctaaggcctgggcacctgtgaaatagggccatgcccccccttatactgggaagagtaagatatttcaagactaagatgttttctacagctccatctttttctttaagctctacatcaaggacataattaaaattggttgtctcctaagtggtttactaaaaatgcatacttaagagttaccattataattaatatttgtatctaaagctacttaaaaattttcacacacaaatctgactgaacaagtaaaatatattttaagtcaaagtttataaaaggacatgagaacatagcttttatgaaaaaattagttttgtcaagtttagaggttttcaaatattttaaattcaggaaataaaataacaaaaagacaaaagaaaatggttgaacaacttagaaaaggtttgttaaaattcatcttataaaacaatctacatgtaaaaagtgggctaaaatttgaaagagattatttaggttttccataaattaatccagaaggggtaggaagtcttaagaatgaggaaggacaggaggaaggggaggtcatcctgacactgcagaggcagaagtgcagctgaaggtatgaaggctaagaggggaggggagtttgagtgctgctgcctggctgtcagagcagaggagggtcctgggcaccagacttgaggaagggatgaaaatgctgggcagacctgtagtgggcccttgagatggcagatagtggtttccagagagagggccattgttttccagtgcccagcactgagcagagagagttttgggcagtgtaaaaaaaaaaagagaacttacctctttctcgttttagaaaaagaacagtctaagaatatcagcagggaaactctcagtgcttcaaggggttaaacgcccttttggctttcttgtgttggtttcatcatagaggaggagaaacttcttggaagtgttcctaaaaacacaacacgtctgcttctcctttcaaaaaaggaagtgctaaaacacgaacactctagatccaaatattaatacggatgtctaaatgcttccgttttccaaggggcagaaagctaaaggttgtaacctattcatttcagtcaaagttggtgaaagggaagcaaaggaactgggtggggcttggaaggatgacgaagctcaagctcattggccagcaacctctctcctgggggcgggaggggtgagcatacgtcattgctttggcttctataaaatgaggaggactcaccgagtgtgaagagtccttctggtgattgcagctgagagcacactcacgacgttctgcaaggattctctgattatgattctgaagggaaaagcgatggaatggacagcagagattgtaattttctttatcttgaattacggaagaaagtatctaggacagaaatccacgacaagtccttggaaccagcagatctcttcgttcacggagacgttgacgtattctctattgaagaagattcttaccttcttactggacaaggttttgtcagttctgcgtgactggattgtccgggagactctgaggaaactgatgtcacatgtttttccaaagaagatgtttctggaaccaacaactgtgattgtggtttgaggacttctgagagttccagtacaggaaataagcagaacatcagctggaggctaaacggatccagacttcactcttcacttcccttcctattcagtctattgtgcctgctgactgagaagcttggctggtatgtgagcaaataaacggaactattcagaaggagatgttgacatattctgtattgaagaagatccttatcttctcacctgacaaggttttgtcagttctgtgtgactggattgtccggaagactctgaggaaactgatgtcacatgtttttccaaagaagatgtttctggaaccaacaactgtgattgtggtttgaggacgcctgggagttccggtatgcgaaataagcagaacatcagctggcggctgaagggatgcagcctccactcttcacttcccttgccattccatctattgtgtctgcctgactgagaagcttggctggtatgtgaggaaataaacggaattataaacaaggagattgtttctcatctacttcattctgttgtggcttttctattttggggttcagggtgtgtgacaaggaccaaggagatgaaaggtttcatgatggagaaagcccaggcaatcagattgaagagctatccacagggaatcttggctgctgaggggctgcaccctgcaacggactgaccatatgacagaaaagggttttaaaggctcaacttctggactgagaacccagagtaatttgggaacctcctctgtgaggagatatgaaagctgggaatcatgacatccctaggaatggaaggcacatttcctgatggaaggggtgctttggaaaacaggagcagagtagacacagcagccttgtggatacgggtgggcagcatgcatgggtgatgtgaacgtggagtgtttgtgatcgaaactcaaaatgtctgacaaagtgaaaacctagaaaccacaatgaggaggaagagtttgtgagggcaatcactctccccatgtgtgaaaatcgggggctcttaaaatctcatctggagaggtgcagtctaccaaactctgggactttagcctccccttttaaaaaaccgtgcatcaataccaacgtccgaaaccacagaaataacacctggcttgcatggagacaaggacaaaaagccgtcatgatgagttgttctgctcacttgctgcctctgttcagtgcacaggatattgtccacccactagcaggctactgcaagagaagtgtgcaatatgttccctatgtgccatatatgtgccatatggcccatatgacaactgagtcagaaaatatctgatgccctcagagttacactccacctggagcttgcccccagccatccaggacctaggctccctaccctgtccaattttctggtgttttgggggcttcattctctaaggtgtgcccactctttactcaaaccaaaacacccacatattcctgcccatgaacaaccaatcaaccacttctcagttccacatcctgctgttgggtctctagtggtgacactgtaactcccaggtcatagtggtgacactataacacctagctaaattgatgccttgtctctaggaggccatgggctcctgcaggtctcatctgactctctgtagccttccctgacaatgctcacaatacccaagccagagccacattgacagcaagctgctctcatcttacctttgccagacctggccactggaaaaggctgaccctcatcctgcaatgcctatacctccaacctttgtctcaagctggtgtcctggagggacttctaagcagaaaacagattcagactcccatcctctcctgaatggcctcatatccaattctcagaccctcagccttcattgtaaggacacttcatccatgcccttgagtattctgtctgcactgtgtattctgcaatagattctcctccctctgcgaccctcaactccttccgcagactttttgttttcttgatcatctaccatagtcttccactgggacactgccaagcccattctggagagtgagttgtgcaagtacactgccccccatctacctttcgggaggtgtatacacccttctttctcccaggtctggaggctttctattttcatcctgaggcatctccacctgctcttggattcttcaaattgacaaccaccagttaacaagaactatgtgtcaccaaatagccaaacaatggcaattacaaaaataaaattaatagctgtaacccccattagcaaggatacacaaatcaaatcagggatagtgggtgaggaagtctgcctaacattcaaggaaggattctgaagtgatacaaaatcattgcctttgctatctttagaatggacactttcagccaggcacagttgctcagcctgtaatcccagcactctgagagccccagttgggtggatcacttgaggccagcagcttgagaccaccctgggcaatgtgcagaaaccccaactctactaaaaatacaaaaatagccagttattgtggcacatgcctgtaatcccaactccttgggaggctgaggcacaagaatcacttgaatctgggagccagagtttgtaatgagcgaagatcatgccactgcactctagcctaggcattagagtgataatctgtctgtggaaaataaaaacattcctcttcaaagttttcttctttaaatcataaatgttggaattaatatatcctctttgaaactcactttcttcaagcttctttatttgatggtagtaaatctttgttaagctttatgaggcaagagtaatggaagaagcatattatatatatttatactctaacctcagtgcttgttctagcaagctcaggcatgcgtgaatgtgcccaggcatgttccagcccataccttatatcctttccttattgggaaatgctgttactcctataagcattcttgtaagcaacttcctctttttctttgtctccactatctttacctattgaggacagttttaggttcttagccagttggatgtagcatagactgtgaggtccaaccccagccaatggagatagcacacagcagtagcgacctcatgcttaacagataaatattcctgtctccctttgtttggggtgctctcagctgatgagcaacaccctttctaaagaaattaaagttgtcttgctgagaaaacttttggtctaaatgctgattcttccttgcagcactgaagaagaagcaattatttccaacactttctcatacacaaaaaaagaagaaggtggaagaaaactttcttgtgcaccctatccctcactcagaaagacaacagaaggctcctagtggcaagccctagaggattcatttcttttgggaaccctcttggctgggatactaggactcaggtcaaactcagcattttcagtgtgtgggaagtgtgcttgggtttcactgttacttccaataatgtgatttggtccttggggttcaccaaattttggtatggagtggtgaaccctgttaagtttaagtgtctataaaattaacaaagcaaaataaccattctgccccatggttcagagaccaaatattgtgtaggaaatgctttagcgagagaaacagagaagaataaaaaatgtcctcaagcgctgcattatttcttgttatcgtccagatcttagaggaaaggctttcattttccctcattcagtatgatattagctgtgcatctgtcatttatggcttttattatgttggggtatgttccctgtgtatgtagttttttcagggtttttgttatgaagtgatgttgaactttatcaaacgtttttcagtttcagttgaaacgatcatatgctttttgtccttcattctcttgatatgatgcatcatgttgatgatttccatatggtgcactgtccttgcatcctgggcatgaattccacttgatcatgacaaatgaatttttaatgcattcttgaattccgtttgctggtattttgttgaggatttttgcatcaatattcatcagagatattggcctgcagtttctttttttttcttttttctttgttttgttgtttgtttgtttgtttgttttgatgtgtctatgtctggttttggtatctgggtagtagtgttccatccccttttattttttagaataatttgaataagactggtgttggttctttaaatatttggtagaattccgaagtgaagtcattgggccccgggcttttctttagtggaaggctgtttattatggcttcaatctcgttacttattattggtctattcatgttttgaatttgttccttatttaatcttggtaggctgtgtgtatctaggaatttgtccatttcttttagattttcaaatttattggcacataattgcccattgtagcctctaatcgtcatttgagttcctgcagtaccaattataatgtctccttcttcatttttgattgtatttatttggatcctgcccctttttttcttacttaggctgcctaataatttcttaattttgttgaactttttcttttgtttgtctcgctctgccaccaggctggagtgtagtggtgtgatcttggctcactggaacctccgtctcccaggttcaagcaattctcctgcctcaccctcccaaatagctgggactacaggcaagtgccaccactcccagctaatttttgtatttttagtagacacgggttttcaccatgttggccaggatggtctcgatctcttgacttcataatccacctgcctcagcctcccaaagtgctgggattacaggcatgagccactgcgcccagcctaattttgtttaaattttcaagaaatcaacttcttctttcattgatttctgtattttttatttccattttatttatttaaactctaagctttattctatcttcttctcattttagctttggtatgcttattgcctctctagctctttaatgtgcattgttagattgtttatttgaagttcttcctctctacaccataagacgtaagcatgtcctcattatgtcataagatgtaaccacttacagctataaacttccttcttagttctgcttttgctgtatctcataggctttgttatgttgtgtttccattatcaattgtgtcagaaatttttcaatatttttcttaatttcttcattgagcaactgatcatttgggagcatatttttaaacttccatgtacttacatagtttccaaaatacctcttgtgatcaatttctagttttattccactatggttcaagaagatgcttgatattatttcaattttttttcacattttaagatgtgttttgtgacctaacatatggtctactttttttttttattaaactttaagttgtggggtacatgtgtagaccgtgcagttttgttacataggtatacacgtgccatggtggtttgctgctcccattaacctgtcatctacattaggtacttctcataatgctatccctcccctaacctccaccctctgacaggacctggtgtgtgatgttcccctccctgtgtccatgtgatctatttttgagaatgatccatgtggattagaatgctgtggaaaagactttggattcctaatatccagggagggagacgatgatattactttcaatatcacacgggtgtacacactctctgtgacattgttcctaatatccagtggaagagaggatgatataacacccagggagggagaggatgatattactcttaatattgcagggtgtgtacccatgcctatgatattgttcctaatatcaggagggggagaggatgatattactcagaatatggcagggggtgtacacacactctgtgacatggttcttaatatacaggggagaatgggacaatattactctcaatatcgcagggggcgtacaaccctgtgatttgttcctaatatacaaaaggggacagtatgatattgttcctaaaatcgcagaaggtgtacaacgccctgtgatattgttcctaatatccagggcgggagaggatgatattacccccaatatcacagggggtgtgcactttccctgttacattgttcctatgatccgagtggggggaaatgacattagtcccaatatcgcaggatgtgtacactactcccccatgatattgttcctaatatcaagggggagagaggaggatattactcccaatatcgcaagggaggtacatcctccatgcaatattgttcgtaatattcaggaggagagaggaagatattactctcaatatcgcagaaagtggacacccaccctgtgatgttcttcataatatccagggaagcagacgattatatgactttcaatatcgctgggagtgtacatcccttttgggatattgtttctaatatccaggaagggagaggattatattacttccagtattgcagccagtgtacacatttcttgtgatattgttcctaatatccagaaagggaaaggatgatattactcccaatattgcaggtggtgtacacccccctctgatattgttccttacatcaaggaaaagaaagaagaatattactcccaatatcgaagagagtgtacacccctcctgtgatattgtatttaatatccatggggaaagaggatgttgttactcccaatatcgcagggggtttacacccacactgtgatattgttcctaaaatccagtgaaggagaaaataatattgctcccaatattgcagggtgtatacaggccctcccccgttatattgctcctaatatccagcggtggagaggatattactttcaatttttgcagggagtgtgtaccccctctctgatatttttctaatatcaaggatgggaaaggatgccattactcccaatatcgcaggaggtgtacatgccctgtgatattgttcctaatatccagggaggtagaggatgatattactttcaatattgcaggggctgtacaccctctatgatgttgttattaatatttaggttgggagaaaatgatatttttcctaatatcctgggaaggaaaggatgatattactgtaaatattccagggagtgtacaccttcctaatattctaatattgttcctaatatccaggggtgggagaggattatattactcccaatatcgcagtgggtgtacacccctcctgtgatgttgtttctaatatccaagcgaggagaaaatgatatcactctcaataccgcagggggtgtacaccttccccatcatatcgttcctaatattcagagggaaagaagatgatgttactttcaatatcgcaggggttgtacacaacccctgtgatatttctcctaatatccaggaagaaagaggatgatattgctcccattatagcagacggtatacgcctccctgtaacattgtttctaatatcaagactgggagaggatgatatcacttccagtatcgcaaggggtgtacacctcccccgtgatattgttactaatatccagggggaagaggataatattactttcaatattgcaggggctgtacacccccgtgatattgttgttaatatttaggttgggagaaaatgatattagtccaaatatcgcagagagtgtacacacttccgataatattgttcttaatatccatgggggagacgatgatattacacccaatatcgcagggggtgtagtctccccttgtgatattgtccctaatattcagggaagtaaacgatgatgttagtgtgaatattccagggagtgtacaccccctttgtgatattgtcctaatatccgcaggagagaagataatattactcccaatatcgcagggggtgaacacaccccctgtgatattgtttctaatatccaagcgaggagaaaataatattactcccaatgtctcaggggatatacaccttccctatgatattgtttctaatattcaggtggaaaacgggtgatattactcctaatatccaggaagaaaggggattatgttactccccttatagcagggggtatacacctcccctgtaatattgttcctaatatcaaggctgggatatacgtggggggaaggatgatattactcccaatatcacaggggttataaaaccttctgtgatattgctcctaataaccatggcggaagaagatgatattactcctaatattgcaggaggtgtacactcccccattatgttgttcctagtatgcagaaaaggagaggatgacattattgccaatatcgcagggtgtgtacaccacccatgatattgttcctaatatttagagggacagaggatgatattactcccaatatcgcagggggtgtacacgcatcccctgtgatattgttcttgaaatcgaggggaaagagaattatatttctctaaatattgcagagggtgtacaccgccccctgtgatattgttcctaatagccgggggcggggggagataattaaattactttcaatatctcagagagtgtacatcccccttgtgacattgttcctaatatccagagcaaaagagaatgatattcctcccagtatcgcaggaagtgtacatttaacctgtaatattgtttctaatatccagggggaagagaatagtaatactcccaatatcgtaggggttgtacaccttttctgtgatattgttgcaaatatttagaagagagagagaatattactcgcaatatcacagggaatgtatacttcccctgtgatattgttctaatatctagaaaaagagaggataatattactcctaatattgcagggggtgtacacccccacttgtgatattgttcctaatataaaggaaggtcgaaaaacaaacggggagcccagggggaaggaaggcaggcgaggaagaggcagcgccggggcgccggagggagcagccgggccgcggaagcgcgagcacgagaccggtcgcggtcgcagtcgcatttttgccgttgtcgcggccgccgccgccgaggcttacccggggatgtctgagcccgcgcctcgcggcccccaagctccacgctgcgcccgctgtcccggcctctaagggccgccacgtccctgcggcgcgcgcaggcagaaagcggcttcgtgccggcggagggggcccgggcgggccgggaaaggctgccccaggccccgcgcctaccccatcaccgcggccggcgccgggccgggaggatgagcggtgtggggctctgaagcatggagggggttttgtacaagtggaccaactatctcacaggttggcagcctcgttggtttgttttagataatggaatcttatcctattatgattcacaagatgatgtttgcaaagggagcaaaggaagcataaagatggcagtttgtgaaattaaaggtgacagctttggaggggaccacccttgattggatacataaattctgttcattcagcagacaacacaagaatggaattaatcattcctggagagcagcatttctacatgaaggcagtgaacgcagctgaaagacagaggtggctggtcgctctggggagctccaaagcatgtttgactgatacaaggactaaaaacgaaaaagaaagaagtgaaaccagtgaatcgctgaaaaccaaaatgtctgaacttcgcctctactgtgacctcttaatgcagcaagttcatacgatacaggaatttgttcaccacgatgagaatcattcatctcctagtgcagagaacatcaatgaagcctcttctctgcttagtgccacgtgtaacacgttcatcacaacgcttgaggaatgtgtgaagatagccaatgccaggtttaaacctgagatgtttcaacggcaccatccggatcccttagtttctcctgtgtcaccttctcctgttcaaatgaggaagcgttctgtcagccaccctggttcttgcaccagggaggagtagccactgtataaaagaaccagtatctgcacttcaccgactctcccagcgacgccgaagaacctactcagatacagattcttgtagtgatattcctcttgaagacccagatagacctgttcactgttcaaaaaatacacttaatggagatttggcatcagcaaccattcctgaagaaagcagacttatggccaaaaaacaatctgaatcagaagatactcttccatccttctcttcctgaagaaactgtagtgtccaactttctctaagtattgctatgcaaaagctgctgtaattgaactattgttatagggagtagttttttcccttaggactctgcactttatagaatattgtaaaacagacaaacaagaaaacaaaccacatacttttgaagcgtgttttatctttatatagtttgtttgcaagagtattttcctaataacttcacagtatgaatgtgcatcttttttttctttttttaacaaatgatggtgtaacattttgacatccataaggacaaatgtagatatttttctaaaaaaccgtgaggggactgacagcttggtcagggtgtattgtagcttataaacatgaaatcttacaaggtttcagtttgacagaagtgtgatatatgtaacttgtgccatggaccaaatggtcactttaccacagctaaaaatgagttatgatagcagcttgatggtgattgcattgtattcctttaatcaaaaaggaaacgcaatattctaagtatctttagcccaaataccatgacatattgagcatctttaaataaccagactgtattgtccttcatatgtgaagttgacactactgatttgtcaataccaaattttgggttaaagtgtttaatttttatttatttattttcttgttgcctcaaaagatgattgcattctaacttttgtgacctaccaaatttaagatgtgtatacattgttctttacgttgttctagaaaagagattttaatgctgtagtgacttagctcacttacatcagagaaataaacaactttcaatggaaaaaaatatatataaaggaaggaagaggatgatattacttctcatatagaaggggttgtacaccccccttgtgatattgttcctaatattcagggagggagaggattatattactcccaatatagcagggagtgtacacccccccccccgtgataatgttcctaatattcagggaagcagaggatgatattactttcaatatcacagggggtgtgctgtccccctgttatattgttcttaatattcaggggggagaggatattattatgcccgatatcacaggagaagtacaccccacaagtgatattgttcctaatatccaggggtaaagaggatgatatcgcaggtggtgtacacccctccccgtgatattgtttctaatataaagaaggagagagcatgatattactcccaatatcgctggaggtctacaccccccttgtgatactgttcctaatatccaggaagggaaacaatgatattgctgtgaatattccagggggtgtacacccctttgtaatattgttcctcatatccagggggtagagaggatgatattactcccaatatcgcagggggtgcacggccccactgtgatattgtttttcatatccaggaggggagaggatgacattactctcaatatggcagggggcgaacaccccctgtgatattgtgctagttaggttgggagaaaatgatattactcccaatatcgcagggggtgtacaccgctcctgtgatattgttcctaatatccatgacgggagaggatattactcccaatatcgcagggggtgtacctctcccctgtgggattgttcacagtatccaaaagggaagaggatgatgttactcccaatatcacagggagtgtacaccaccattgtgatattgttcctaatagccagggaagaaaacgatgatattattgtgaatattacagggggtgtacacaccccctgtgatatggtttttaatatacaggttggaaaaggatgatattactcccaatatcacaaaaggtgtacacacccccccatgatattgttcttaatacttcggtggggagaaaatgatattagtctccatatcacaggggtgtgaactcctccggtgatattgtttttaatatcaagaggggaggagatgatattgctttcaatatcgctgggggtgtacatccctcctgtgatattgttccttatatccaggcgaggggaaaataatattactcccaatagtacacaccccatgtggtattgttcctaatactcagggggaaagaagataatattactttcaatatcacagggtttgtacacctttcctgtggtatagttttcaatatccagggggaaggtacatgatattactcccattgcagcaaggggtgtacacacctcctgtgatattgttcctaatatccagaagtggtgaggatgatattactcccagggggtgtacaccccacctatgatattgtttctaatatccaggggaaaagagtgtgatattatgcccaatatcgcagagggtgtacacttatcctgggatattgtttctagtatttggggagggaggagaggatgctattattctcaatatcgcagaaattgtacacccccgctgtgatattcttcataataatcagggaaaaagaggatgatattactaccaatattgcagggggttacacttcccctttggtagtgttcctaatatccaggaagaaagaggatgatattaatcccattttccaggaagtgtacacccaccgtgtcatgttgttcctaatatccagcagggaagaggatgatattactcccaatatcggagagggtgtacacttcccctgttatattgtttctaatacccagggggaagaaggatgacattactgccaatatcacagggtgtgtaccccaccctgctattgttcctaatattcaaaaggaaagatgaaaatattactcccaatatctcagggtgtgtacacctctcctgtgatatcgttcctaatatccacaggaagagagaatattactctcaatattgcaggggggtgtacacccccctgtgatattgttccaaatattcgggcggggagaggatgatattagtcccaatatcgcagggggtgtgcaccaacctgtgatattgttcctaatatccatgcgggggaggacgatatcactctcaatgtcgcaggaagtgtacacctctcttgttatatttttcttaatatccaggagggaaaagatgatattactgccaatatcgcagggtgtgtccaccccccttttatattgttcctaatatccaatggaaaagaggatgacattgctctccatatcccagaaggtgtacaacgcccctgtaatattgttcctaatattttgggggaagagaggatgatataacttataatatcacaggaggtgtacaccacccctatgtattgttcctaatatcctttaagggagaggatgatattactcccaatatctcaggtggtgcctattccccctgtgatattgtttttaatatccaggggaagagagtatgatattacgcccaatatcgcagggggcatacaccctctctgagatattgttcataatatatagagggagagaggatgatattacttccaatatcagaggtggggtacaccccccggttatattattcttgatatccaggaggggagaggttgatattactggatatatagcagggagtgttcacatcttctgtgatactgttcctaatatccagaaaagtagaggatgatattactcccaatatcgcagaacgtgtacacctccctgtgatattgatcctaacattcaaaggggagaggatgatattactcaaaacatcacagggcatgtacactcccctgtgatattgttcctagtatccagaagggagcaagataatattactttcaatatcgcagggggtgtacacccctctttggtatgtttcctaatatccagaaggaaagagggtgctattactttccatattgcaaggggtgtacacccccctgtggtatggttcataatatccagggagggaaagggtgctattattccccatatcgcgaggcatgtacaccctgctgcggtacggttcctaatatccagggggaaagaggatgctattacttcccatatcgcggggtgtgtacacccccgtgtggtatgttttgtaatctccgggaacgaagagggtgttattacccctcatatcgctggaaatgtacactcccctgtggtacggttcacaatatccaggggattgagggtgctattactccccatatcgcggggggagtgcacctccctgtggtatggttcgaaatatccagggtaagagagggtgctattattccccattttgcaggaggcgtacacccctctatggtatgttttgtaatatcccaggtaaggggtgctattgagagaagagagcaaaagaccccccccatattgttctgtattattttatactcagtacctgttttaagaagaaacaaggaagcgaaaccaaaggcaggcagcccggcgccaggcaccagatccaaaaccagacccgaaaccaggcctgggccttcctgaccttagcctgaaagttaaaattcaacccatgacctagcaactgatgttatccatagattccagacattgtatggaaggacattgtgaaatttcttgttctgttctgtttcactctgagtactggtgcatgcagcccttgtcacatacccactagattgctcaatcaatcatggccctttcatgtaaaaaccttagtgttgtgagcccttaaaaaggacagaaattgtgcactcaacaagcttggattttgatactctagtctgctgatgcttccagctgattaaaagccacttccttcactacctcggtgtctgtgggattttgtccgcggctcctcctgctacactgtgactccccttatagagaggggtgtacacccccctttggttcctaatatccagcgggggagtaggtgctattactccccatattgcggggagtgtacacccccttgtagtacggatcgtaaaatcaaggagggagagaaggtgtaattatccccatatcacagggagtgtacacccctttgtggtatagtttgtaatatccacgacgggagagaatgctattactccccatatcgtggagggtgtacaccgccctgtagtatggttcgtaatatccggaaggggagaggttgctattactccccatatggtgggaagtgtacacccccatgtgatatggttcataatatccaggggggtagaggatgatattacccacaatatcatagaaggtgcacacccttttgtgatattgtccataaaatccagaaggggagaggatgatattacttccaatatcacagggggtgtgtagccccatatgatattgtttgtaatatcaaggtagggagaggatgctattccttacaatagctcaaggggtgtaaccttcttgtgatattgtttgtaatatccagaaggggagaagataatttttttattttaaaagtaaactttaatgtcaaaaatgcaaacttgagaagggcagaaagatcaaacagaaggctgccacttcacaattggagggttgcacagtggccgggcagaggcgctcctcactccccagacggtgaggcagccgggcagaggtgctcctcacttccgagatgttgcaggagccgggcagaggtgctcctcacttcccagaacagggggctgccgggcagaggtgctcctcactgcccagacggtttgcaggcctggcagaggcactcctcacttcccaaacggagcagcggcaagccagaggcgctccacacttcccagatggtggggcagccgggcagaggcgatcctcacttctcagagggtagggcggcccagcagaggcgctcctcacttcccacatggtggggcggcaggctagaggcgatcctcacttcccagacggtggtgtggccatgcagaggtgctcctcacttcccagatggtgtggccgccgagctgaggcactcctcacttccctgacagtggggcggctgggcagaggcgctcctcacttcccagacacttggactccgggcagagactctcctcatttcccagatggtggggctgccgggcagaggcgctcctcacttcccagacggttcagaggccgggcagaggcgctctggggagaggataatgttactcccaatatcgcagggggtgcacactccctgtgatattgttccgaatatccagagggggaaaggatgatatagctcccaaaatcgtggggagtgtacacccccctgtgatcttgtttgtaataccaagaagaaaagagaatgctattatttccaatatagcagggggagtacaaccccctgtgatattgttcgtaatatctagggggagagaaaattatattagtcttaatatctcaggggacgttcatccccctgtaatattgttggtaatattcagaatggagaagatgatattgttcttaaaatacaggaaaaaatatgataatattacttccaatatcgaagggggtgtacactctcctgtgatattgttcccaatatccagaatgaaagaggatgctattactcccaatatcccagggagtgtacacccctttgccatattgttcataatatccaggggaagacaggataacattactcccaatatcaccgggggtgtccacccactagtgatatttattgttcatcatatccagaaaaggagaggatgatattactcccaatattgcaggtggtgtacggtccctgtgatattctttgaaatatctagaaaaggagaggatgatatcactccgagtatcacagggggtgtacacccccctgtgatattgttcgtaatatccaggggagaaaaggatgatataattgccaatatttcaggggatgtgcacctccctgtgatattgtttgtaatatccaggggtggagaggatgatattactcaaaataacgtaaacatcctgtgtgtacatcccctgtgatattgtttataatatccaggggggtagaagatgacattacccccaatatcacagagtgtacacacccctgggatactgttcataatatccaggcgggaaagaatgaactacttccaatatcgcaggatatgtacacccccctgtgatatatttcctaatatttatgtgggtaaggatattacccccaatatcacagaaggtgtacatcctctttgtgatattattcctaacatccaggaaaggagagaatgatattactcccagtatcgcagggggtgtacaccacccctgtgatattgttgctaatatccagggggagaggataatattactcccaaaatcacaggggacgtacactcctcctgagatattgttcctaatattcatggggaaaagaatgctactactccaaatacagcagagggtgtacaccatccccgtgatattgttttttatatccaaagggtgaaaggctgatattactcccaatatcgcagggggtgtacaggccccccatgatatcattcttaatatccagggaggcaaagaatgatgttactcccaatattgcaggctgtatacaccccccgtgatattgttcctaatatccagagtaagagaggatgacattgctcccaatattgcaggggttgcacgcacgccctgtgataatattactcccaatatcaacagtgggtgtacactcctcctgtgatattgtttgttatatctaagaaagaagaggatgatattactgtcaatatcacagaaggtgtacagccccttgtgatgttgtttctaatatccagcggtgagaggatggtattactcgcaatattgtagggggtgtccaacggccctgtgatattgtttctcatattcaaaaaggaaaagaataatataactccaaatatcgcagggtgtgtacacttccctgtgatattgatcctaatatccaggaagagagaggatgatattaatcccaatatcacagggggtgtacatcgcttctgtgatattcttcctaatatccagggggggaggggatgctattactcttaaaatcgcagggaacttacactcccactatgatatttttcctaatatccaggaagggagaaaatgatattactcctaatatcacatatcacaatgggtgtacatctccccgtgatattgtttctaatatcaaggatgggagaaaattatattactctcaatatcgcagggggtgtgcacacctcctgtgatattgttcctagtatccagcggaggagatgatattactttaaatattgtagaaggtgtacaacccccctttgatattgttcctaatatccagggggaaaggagatgatattactcctaatatcgcaggggctgtacaaccctatgtgatattgtttcttctaatatccaggggtggagaagataatattactcctaaaatcgaaggggacatacactccccctgtgatatttttcctaatatccagaaggaaagaggatgatattactcctaatattacaagaaatgtatacctgtcctgtgatattgttcctaatatccagaggggtaaatgattatattactcccaatatcgcaggggtgtacaccttccctgagatattgtttctaatatgcagtggaggagaggatggtattactcccaacatcacaggagatgtaaactccccttgtgatattcttcctaatgttcaggacgaaggagggtaatattactcactgtattgcagcagggggtgtagagccccctgtgatattgtttttaatattcaaggttggagaaaataatattccttccaatatcgcatggggtgtacacccttctttttatatagtttctaatatctggggggagaggatgatattactcccaatatcgcagggggattacacccccactgtgatattgtttttaatatccagggtgggagaggataatattactccaaatatcccagggctatacaccctccgtgtgatattgtttctaatatccagaggaagagaagatgatattactcccaatgtcacagggtgtgtacaggccttctttgatattgttcttaatatccatgagggagaggatgatattactcccaatatcgcaaagactgtacaccctttctgtgatattgcttccaatatccagggagggagaggatattacactcaggatcacagggggtgtacaccccaacctgtgatattgtttctaatatctagggaaaatgagggtgatattactatcaatatcacaggaggtgtacactcccttatgatattgttcctaatatccaggagaatgacaggataatattactcccaatatcgcgggtggtgtctccccccactccgtgatattgttcctaatacccagagggggagagaatcatattactcccaatatcgcaggggatgtacacctacatccggcggagtagaagataatattactcacaatatcgcaagaagtgttcaccttccctgttatattgttgctaatatccagggagtgagaagatgatattactttcaatactgagcgtgtacactacccctgtgatattgtttctcatatccagtagaggagaaaatcatgttactcccaatattgcaggggtgaacacctcctttgtgatatttttcctaatatcaggaaagggagagtatgatattacccttaatattgacaggggtgtacacccccctttgatattgttccaatatccaggggggcagaggataatattattcccaatatcgcagagggtgtacaccccccgtgatattgttcctaatatccagagaaataaaaaatagtattatttccaatatcacagggcgtacattttccctgtaattttgttcctaatatctggggggtggggtggcaggataatattactctcaatattggagagggtgtacacccccctgtgatattgttcctaatattcagggtgggagagaatgatgttactcccaatatctcaggagtcgtatacacccccttgtgatattttttctaatatccaggaggcagaggatgatattgctcccaatatcgcagggggtatacacccgagctgtgatattgtttctaatatgcaatatgggggaaggatgattttactttcaatatcgcagggaatgtacactttccttgtgattttgttcctaatatccaggggtggagaagatgctattactatattactcctcatatcgcaggcggtgtacaactccctgtgatatggttcagaatatccagagtgaaaaaggagggtgacattactcccaatatcgggggggtgtacacccctttgtgatgtggttggtaatatccaggggggcagatgagggtgatatcactccccatatcgtggaaggcgtccacttttttgtgatgtggttctttatatcccgaggggagaaggtgatattactccccatatcgcgaagggcatacacccccctgtgatatagctcataatattccggagagtggaggaagatactatgccctatatcgcgggtggcctacaaccccctatggtttggcttataatatccaggggggagagggtaatattgctccccatattgtggagacgtacagccccctgtgatatggtttgtaatatctttggggggcgagggtgatattactccccatatcgcggggagcatacacccccgtgatctggttcatagtatctcaaaggaagaagttgatgtgtacaacttaagggaaaaagttgaagtgaagtgtacacacgccctgtgacgtggttcataatatccaggcgggggagaggagagtgatatttactccccatatcgcgggtgttgtaaactcccctgtgatatagttcataatatccaggggagagaggagggtgatattgctcctcatatcgcgaagggtgtacaaccccctgtgatatggttcataatatccagaagggtagaggacgatgatattactccacatatcttgggaggtgtgatatggttcgtaatatccagcgatgagagaatgatattactccccatatcgcaaaaggtgtgatagggtttgtaatatcctgagggggagagggtgatattaatccctatattgcagaaggactacaccctcccatgacatggtttgtaatatcccagggggtagagtgtgatattactttccatatcacagggggtgtgatatgattcgtaatattcgaagggggagagggtgacactactctccatatcacggggtgtgtgatatggttcttaatatcccaggggttagaggttgatattaccccctttttggggggtgtgtacaccccctgtgatatggttcgtaatatcccgggggagacagggtgacattattccccatatcgaggggatcgtacaccccctgtggtgtggttcataatatccctagggggagatggtgatattactccccatatcagggggcgtgcactcttctgtggtataattagtaatatccagggggcagaggtcgatattcgtttccatatcatgaagggagtacacttccctgtgatatggttcctaatatccaggggggagagggtgatattattccccatattgcggggggacatacaacccctgtgatatggttcataataaccagaaaagaagagggtgatattaatccccgtattgcagagggcatacaccccccctgtgatatggtttgtaatatctaggggaggaaaaggtgatattactttccatattgctgggtgcagacacccctttatgatatggttcataatatccaagttggagagggtgatattacttcccatatcatgggaggtatacccttccctgtgatatggttcgtaatatccagaaggggagagattgatattactccccatattgtggggggcgtacaccttcctgtgatacggtttgtaatatctaggggatatagtgggtgatattactcaccatatcacgggggttgtaacatggtttgtaatatccaggggaggagagggtaatgttactccccatatctcggggcatgtacaccctcctgtgacatggttcgtaatatccaggtcgggagagggtgatattactcctcatattgccgggggtgtgttatggttcataatatcctggggaaggaggctgctatcactctccacatcttgggggatgtacactctcctgtgatatggttcataatatccagggtgggtgagggtaatattactccccatatcgcgggaagtgtacatacccctgtaatattgtttgtaatagaagagagggtgatattactccccacatcgcgggtggtgcccacccccctgtgatatggtttggaatatccagggggatgaggagggtgatattactccccatatctcggtgggagtacatccctctttgatcaagttcataatatccaaaaggaaacaggagagtgatattactccccatatcgccgggggtgtacacgggagggggagtacacccccggcgatatggtctgtaatatccagggaaggagaggagggtgatattactcaccatatcgcaggtggtctacatttacctgtgaaacagtttgtaatatccagggggggaaatgagaatgattttttttttttgagtctcactgtgtcacccaggttggagtgcagtggcacgatcttggctcactgcaacccccgcctcctggactcaagcaattctcctctcccagcctcctgaatagctgggactacaggcgcaccccacaacgtctggctaatttttgtatttttattagagacggggtttcaccatattggccaggctgatctcgaactcctgaccctgtgatccatccgcctcggcctccaaaagtgctgagattacagatgtgagccaccacgcatggcccaaggagaacgatattactccccatatcccagggggtgtatatccccctgtgatatggttcagaatatccggaaggaaagacagggatattacttcccatatcgcaaggggtgtgacatggttcgtaatatcccatgggggagagggtaatattactcttcgtattgtgaagggcatacactcccctgtgatacagttcataatattccggggagtagaggaagatattatgctccatatcgcgggtggcataagccccctgtggtttggttcataatatccagggaggagagggtaatattactccccatattgtggggacgtacaccctcctgtgatatggtttgtaatatcccagaggggagagagtgatattactccccatattgcagggacatacacccccctgtgatatggttcaaaatgtcttttttttttgaaggactggttctttatttcaaaaagacacttgtcaatattcattatcaaaacagttgcactattgatttctctttctcccaatcggccccaagtagaccacatcaaaggagagtacatattaagccaataagctgtaggatgtacacctaacagacctcctagaaaccttaccagaaaatggggacagggtagggaaagaaactttaaaagatcaacaaactgccagcccacggactgcaggggctgtcacagccagatggggtggccagggtgccacaaacccaaagaagcaaagtttcaaaataatataaaatttaaaaagttttgtacataagctattcaagatttctccagcactgactgatacaaagcacaatgagatggcacttgtagagacagcagcttcaaactcagaaaagggtaatgagatgagtttcacatggctaaatcagtggcaaaaacacaatcttctttctttctttctttctttcaaggaggcaagaaaagcaattaagtgctcacctcaacataaggggaacatgatccattctgtaagcagttgggagggggtagagatggaacaaaattttggtctcagaggtcttgccatcttaatttggtcacttctaatgaaaaaaataaaaaatagaaataacattatccaaaggtatcttaaagctgaaaacttgaacagcacattttttgttgttgttgtttggctaactcctcctggaaccacctttctggcttagctagtactttgtacagagcaatgaggcttcccatagtggagtctccctgggctctgtttggctctcagcaaggcaggcctataccttttcctctcctccatggagagaggaatatgcattaaggtgaaaaatcaccttccaaaagtgagaaagggattcgatcgctgcttcagggctgtggtattatatggaatgttttacaaaaggttgctacaaaacaacaaaagaggtaattacaaaatgtgtacatcacaacatactttttaaagacattatgcattgtgctcacattcccttaaatgttgtttccaaaggtgctcagcctctagcccagctggaatctccgggaagaggcggacagtttggtgaaaaagacacagggaaggagcgggcggcggaaggagggggcggcgaaaggagaaagcagccttccagttaaagatcagccctcaattaaaggtcagcttcgggcaggctggcctcaggcggagtctggttcagagggaggagcagcagcagggtgagactgaggcgttctacatctcattcaggtcaagcagagtctggtccagcatcctttgtgtacagaggtgctcccctttggtgcatttcagtttatcttccaagtcatcaattgtcttttccagcttggctaccgatctctcagcaaactcagcatgggtctccgcctcctttattttatcagtaagaatcttgatctcttcctcatatttgtcttctttttgagagtacttttcttcagcagcactcagacacttcaggttctggtccatcagtctaatctgctcatccatctctcggcaaagggattctgccagctcagctcgttcctctgtgcgttccaagtctccttcaatgatcaccaacttacgagccacctcttcatacttcctatctgcctcttctgcaatgtgcttagcttctctgagttggatttcctggagttccatcttttcttcatcttttaaggcccggttttcaataaccttcttacctctctcactctcatcagcagctttttccgcttcttccagcttttgcagggcagtagccaggtgctcctgagcacggtccagctcctcttcaaccagctggatcccacgttcaaggaggccacctcagcctcagcctgttcccgggcccacctttctccctcaacttctcgctggaggcgctcagctcgctcctctgcatcatctgcctgctgctgcagaacctggatcttgcgcttcaccgcctcgatggtggtgatcccagccatggtgcccacccagctactgctagagctccggttcctgcctcctccgatcggcgttgcagcctcctctcacccttacttccgcctcggttcaaaatatcttaagggaaggagttgatattactccccacatcacgggaagtttacatcccctggtgatatggtttgtaatatcccagggtggatagggtgatattactctccatatcgcgaaggagtactcccccctgtgatatggttcataatatccttggggggagagtgtgatattactccccatatcgcgagggccatatactcctttgtgacatggttcgaaatatcccggtgggggagggggtagagggtaatattactccccatacagcgaagagcatacgcccttctgtggcaaggttagtaatacttcagggaaaagagtgcaatattacttttcatattgcagggaacatacactcccctgtgacatggttcgtaatatcccgggggctgagagggtgatatttctccccatatcaccgggggcctacacctgggtgtgatatggctcataatatacagggagggagagggtgatattactccacataccgagtgaggggttacacaccctcgtgacatgttcgaaataccccaaggaggagacaatgatattactttccctgtcgcgggggctacaccctcccagtgatatggttcacaatatcccggggtggagagggtgatattactccctatatcaccggggggtgtacacttccctgggaaatggtttacagtatccccggggggagagggtactattactccccatatcacgttacatatcagggtacacccccacgtgatatggtttgtaacatcccaggaggaagaaaatgatattactccccatatcgcggtggcatacacccctccccgttaaatggttcataatatcttggggtggagagggtgatattactccccatatcacgtggggcatacaccccactatgatatggttcataatatcccggaggggagagggagatattactctccatgtcgcggggggcatatacacccctgtgatatggtttgtgatatcccgggggcggagagggagatattactctccatatcgtggggtcgtacacttttctgtgatatgattcgtaatatccagacggggagagggtgatattacttcccatattgcgggggcgtacacccctctgtgatatggttcataatatcccgaagaaaagagggtgatattactcctcatatcgcggggaacacacaccaccctgtgatatggtttgtaatattcagcgggggagagagtaatattactccctgtatctcggatggcgtacactcccctgtgatatggttcataatatccagaagaaaagagggtgatattactccccatattccagggaatgtacaccaccctttgaatatggttcgtaatatccaggaggggagagggtaatattgctcccaatatcgaaggaggtgttatacggttagtaatatccagagaaggagagggtgacattactccccacatcgtggtgggtgtgcacccacctgtgatatggttcataatattcaggttaagagaggtgatattgctttccatatcgccaagggtgtacactcccgtgaaatacagttcgtaatatccaaaaggggagagggtgatattactcccatatcgtggggggtgtacacccctctgtgatatggttcataatatccagggtggaataaggtggtattactccctgtatctcggggcatgtacatcgcctgtgatatgattcataatatccagaagaagagagggtgatattaatctccatattgctgggggtgtacaaccccctgttgtatggtttgttacactgagttggggagagggttacattactctcaatatcgagtggggcatacacacttatgtgatatggttcataatatcccagggaggagagggtgatattactccccatatcgcgggaggcatacaccccaatgtgatatggtttgtaatatctacatttttttttttgagacgaagtctcgctcttgtcccccaggctggagtatgatggccggatctcggctcactgcaacctcagcctcccgggttcaagcgattctcctgccttggtcccccaagaagttgggattacaggcgcacaccaccacgcccggctactttttgtatttttagtagagaaggggtttcaccatgttggccaggctggtctagaactcctgacctcagatgatccacctgcctcggcctcccaaagtgctgggattacaggcgtgagccactgcacctggcctggtttgtaatatctatgaagggggaaggtgatattactttccatatcacgggaggcgtacaccacgatgtgatatggtttgtaatatccagggggtatactgggtgatattactccccatatcgcggggagtgtatacccttttgtgatatggttcctaatattaagctgaggagaaggtaatattactccccatatcgcaggggtttttatatggttcataatattcaggaagagagagggtgacattactctccatatcacggggtgtgtactcccccatgtgatatggtttgtaatatccagggaaggagaggttaatattactccccatatcgcagggggtgtacacctctctgtggtttgtaatatccaaagggaagaggatgatattatcttcaatatcttggggggatacagtccccagtgatattgttcataatatccagagggggaggggatgatattactcccaatattgcaggtggtgtacaaccccctgtgatattctttataatatagagggggatgatgatattactcccaatatagtaaacaacctgtgtgtacaccccctgtgatattgtttataatatccaagggtggaaaggatgatattactcctcatatcgcagggggtgtatacccctctgtgacattgttcctaatattcaggggaggagaagatgatactactcctcatatcacaggggatgtacacccccctgtgatacttttggtaatatccaggggaggagaaaattatattattccccatgtcacagagggtgtacaccccgctgtgatagtgttcataatatccaggtgaaaagaggatgatattactccgaatatctcaggaagtgtacacccttctgtgatattgttcataatatccaaaggtggagaggaggatactactccccatatcgcagtgggtgtacacccccctgtgatatggttcataatatccaatgtaggagaggatgatattactttccatatcgcggagagtgtacatccccctgttatattgtttgtaatattcagggagaaagaggatactactactccccatatcacacggggtgtatattcccctgtgatatggttcctgatatccaagagatattataatcctctcttggattatgctacctctcatatcgcatggggtgtacacacactttgtgatatcgtttgtcatatccaaggagggagaggattatattaatcccaagatcacggggggtgtacaccctcctgtgatattgtttgtaatattaaggggggagaggataatattactcccaatataattaacaccctgtgtgtactcctccttgtaatattgttcataatatccaatgggggagacgatgatattactttcaatatcgcagaggatgtacatccctttgtaacaatgtttgtaatataaaaggcaagagaggatgatactacttccaaaattgcaggacatgtacaccccccggtgatattgttcctaatatccagtggggaagaggatgatagtagtcccaatatcgcaaagggtgtacacaccccctgggatattgttcctaatataaaaggaggagaggatgctattattcccaatatcacagaaggtgtaaaatcccctgtgatattgttcgtaatattcaggaggggagaggattatattactcccaatatcacagggtgtgtacacagggaggggcaagggccagaagcgggcgggaatccccatgtttgggcggacccagtttctaatggccagcatttgccaatcaaagcttaccagagaactctaaaagccagggctttcctgctagacaagactcatttctggaactgctttaaaaagaaacaaaacttcccaaggaccccttttcctctctgtctgcctaaaataatgttttaaaaactcctaaagcagctgaattcagcccccttcctgggggaatgtatagacggaactcccacctttcccggcatcccaaggccagagtatgtgaaactcctgggtctctatgtgtgtctgagcggctgctctgccaacactccacacagccctgtgtcctggacccaaggcccttatgacctgagctcaagaggggatctcctgatccatgggttgcaaagatccatgggagaagcatggtttctggggcggggtcacacgctcagtcactgtttccctcggatgccggagatggttcctttggctctctgccaatacagggtgaatcatcatccatccctcttttctttgttctcccgggtcaagttgtttgcctagtcagtcccaatgtgagaacctgaatatttcagttgacgcgctgacttcaaaatccccgggcttcgggaggcggagcttgcagtgagccgagatcccgccactgcactccagcctgggcgacagagcgagactccgtctcaaaaaaaaaaaaaaaaaaaaaaaaaaaaaagtccccgggcttttcttttcactcagtggaaggcagctgcttctaattggccatcttggcccgcccccaccacgtgaccttctgtaaaatgcctccactctccaggaacgctctcattatataactttgcctgaaaccaacagcacgctcattgcacatatcatgggctcatttatttcacttataaagaacctggccaaggaagagatagtgcctaaagtggccagtattctgaccgatatgttagaaaaatggtgtgccgaccaattcatgacatgtgtcccaaaactagcaacggaaattgtattcgccgtgttgaggtctctaatccagatgatgctcatctatgtactggaaaaggcagagtcctttcctgacaagctgctgaaactcttcagaaacatctcatatttcctgaagaagatgatgtctggacaagcagcacaggtcgttcagatttaactttctattcatatatccagcacgatattcgcacaattgtcacgaaaccttaccagttgatgagtcctgcacatttcctttaatttcaggaggaagagggtaatccggatgagttttctgacctactctgctgctgtgattaaacaaccaccaggaaattttgacgacactgttctcctgagctcctccctttcctccgggaacaaaacaattgaatttacaaaaataaagtgttatttgactggagtgaggtctcatgtctgcttatgcggtggctcgctgctcagaacagggtgagtctctgggttgtgtgctgaggaggggaggctctcaatctggagaaaacccactgcaggggacacctccatggggtctgagggactgaggatgaggagccggactgggtctagggaaggaggaggtttcagagggtgaaattctggcactaaagcctgggggtgtttgggaacttcctccttccgaagaagtttcagggagggataaagacaaaccctgggctccttgaggggcccttactaatttgagaggactctatcgggaaggagagtgacaatggcctccttgaggactgaggcccctgaataaatgaggcccagatacagtccatgggggatgagaccttcaagggtcacattttggttgggacagaggaaaagtgcagctctgcagccgcagaggaaaacccggcagtgtgaaagcgaccttggaggggccctgtgcgctctgaatgcgtctgagcccccatcccctgtccccgcctctctttctggattcttccagctcggctgtctccgccatcttctgagcgctccaccctgacttattcaagtttcccttctgccttccaagtactccaaaatctttcagatctgtgtccctacccctgtttttagcatgtgttggggctccaggtccctgaaggtttctggcctgaaatccacctccccagcggagtggactgcgttctagagactccacactccgcgaggttcccaggcccctgagggacaaccgagtggcctgcgcacttcagggctccacactcggcaaggtctttcaagcccttggggtccccttcttagttttttccacctttctgggctgcagtcactccataaatgctgggatctgatccccacccccactctcgtttcctcaattctgcgggctacacgctctggcaaggtcctccgggccctggatcccctccctctccctatgcccacgctcctagtcagcccttctggggtccactattttcaggaactaaccgttctcatggagccttgctaaccggaaagctgtgtggaagaaaggctttgaggatagaggtggagatttggctcttccatagtgccactcacccaccccaccatgctgccactgccagacccggacccctgtttcagaacaagtgaccagattcgctcctggacagccctggacactggccttttctctgaaaactactcaccctttctctagtccccacttcatgccagcctcataccctcttccttcccccacgctggcttccgggatcctcctctgctcagacaacctcttctgtgtcccacccccgtttttagaatgctttggggcaccaggttgggggaaggtttctggcctgatatccatctctttccaaactcccttcttcccttgaaaggcttcttgccttcagccccacttctggctccgaggtttcaggacaccctcctcttcatcctcattcttttgaccaccagctttttaggaattcgaacgtccctctcatcttcgtgaatcctgtccaggcatttgttgaccccttcatctgatacccctgacctcacattgccaaaagtctacccctacccagtacactggaattagacaaaatcccaggagttttacctcaactctgagtgtgcccacaggagctctccctgaagccacgtccttttaagcagggtctagggttcctcccttgtcttaatgaactctttgtcacacggaggacgttatggagcccttatgatctttcactgcctttctgcccagcgttttgtctttccatggacatttataatattttccatggacattttgttctctcaatgtccacccctaatttccaacatcccaaagattctcatgtgtttcctgaaagccatttacaggaatggctgtgcccagacccccttccccaggatcctccttcacacctggtaggtgcctctcctagagagatttgcactcagttgtcgtgcagtcacatggcccagatggttgttaatcacccccttcctggcaacagctagcagccagggaatcactggcacagaaacctcagggtgaccaagatgaggccacctctgtgctgaaggctgtgctccagagcctgcttgggatcaggcttaagcaggtcttcagccagacctgatgttacctggtttccttgagctgccctgcctgagctatcgggagcactccctcaatgcacatcttgattccctatctcatgctctgcttctagaaaccatgagctatcaattgctactggcaatggtcctgggaagtcaaccctaagtatggattctggggttggatgactccccacaggacttcagtgagcaacaatcactgctggcagttggaggacagagtcgctagggcatgtgaccactgtgaaaccaccgatgtttcacctggggtaattttggatgaactacggtagaagcactgaaggtacattgcttttggtttggaagattgtaggtaaataatagcgatatgaatgtggaattggatggctgcaaacgagtgccattgatgcattgaaagaggaaaagtcaggctgtcacctgtcactcagcaatttaaagtgtgagagttgggactagatgtggtggctcacatctataatccagagattcgggggaagcttgaagaggtaggatcttttgagtccaggagttccagaccagcctggacaccagagcaagacctcatctctacaacaaaattttcttaaaaattagatgggcttggtggcacgcacctgtacttgtagatctagctaatggggagcatgagataaaaaaatcacctgagtcagggacttaggggttacaatgaggtatgattgtgccagtgcacacactcccacctggccaacagagtgagattctgcttccaaaaaaataagaaataaatcaggtttgagagttggaaagcatcatcttctcctagagccaaaggacatgtacaactgagacccaggaacaaagcttcatcacaaagagaccatcatcagtggagccgggagatgcattccccctcaccctgccttgaggaggcagtggagtcatctgtctgggatcctttctgacccagccctatttgtttgtctctttggcttctttggatttgtatattttagctgttataacactgtaaaacaaacagagtgatttttttgagttgtgtgaatgatgctagctccatagtcaccctgagagtgatgggaacttttgaatttgtggcaagttggagggtagtgtaagtgacctgagattgccaaattggggctagcactggatgtgaggttaggctagtggaaaaatatgcccagaaccagaggagtgtgggctcactgcaggtggttaggctcagatccaaattgtacagatggatagctttggggtaaagaataacatagttgagaagtgcatgtgttagtctgttcatgcactgctataaagaattacctgagactgggtaattatttataaaactcaggtttaattgggtcatggttccacaggctgtacaaaaagtatgatgctggccatcagctcaacttctggggaggccccagaatagttagagtcatggcaaaaagtacaagggaagcaggctcatcttccacggccagagctggagcaagtggtaggagaggtgatacacactttcaaacaagtaggtcttttgagaactccatcaccggacagcacctatgggatggtgctaaattattcatgaaatatccgcctccataatccactcaactgtcaccagcgcagccagccccacctccaacagtggggattacaattccatatgaggtgtgggtggggacacagctccaacctcaatcagtgggcatcctggattgggtctactatagaaggagaaccaggagctgactatgatcttgaaccctacccatgatggccgggcggggtgactcatgcctgtaaccccagcactttgggaggctgaggtgggtggatcgcctgaagtcaggagttagagaccagcctggccaacatggtgaaaacctgtctctactaaaaatacaaaaaattagaccggcgttgtgctggatgcctgtaatcacaccactacgctccagcatgggaaaaaataccaaaacttcgtctcaaaaaaaaaaaaaaaaaaaaaaaaaaaaagactgcccatgaccactgcaccagtgagagggacaccagcatcactgagatgcaagggctggacattcttcataggtcagagctcaaagcaggggacactgatacagagatgggctccatccatagcaccaaagtggtgagaggatgtgggaatggcagaggccagcactttgccatcaatgcaagggggtataaggaggtgacaccagtgccagagtacatcacggggggactgccctacaatatctaggacttacctcttagagcgtgtttcattagcgacaacagatataaatggcagacaggtgtgtccctgcattaacaggaaatagaaatcatcaagaggaacagaaggcagatgtcagcagccccttagaaagtcatcatccttcatacagttaaaatctgagacagttctcacacgagaaggcctaactcaaaaagaggctgggttctcatgaggcaggtttatgcaaaaccaaggaaggtgtacaagtttggaattctccagtttcccttggaaaagacctacagtcatttgcttaggtaactgagcactgaacaaaggtgagtattgttgtcttttagaagctcttggccaagaaggccttgttggcataaaacccatggtttggaaacatcaccatgacccctgttagagtaatggcctaagggtgggggtcaggaaattgatgtattccttgccaacttctgcctctaagtgagtgaactctgtttgtgaacctctctcctctgtggttatgttcctaggctctcatgtataatcaggagtcatagacttagaaacaggaaaaatacttacagtgtttttgtggcctgtgagctatgacttataattttaggaaaaaaacaattgcaaatggaaagcctaagtctatcaatgctcatccaagacaacataatcaataaaaaccaatatcaaatctcaaggcaaattatttcctgtatatagatggcagagatgagcaccaccatcaaaaactcaaggaccagtgctgtgggtccagtcatctgtttcatggaattcaccagtctggtatcttcaaaatccagaaggatgatggcagatggcaggaaagtaatgcaaacgtcatcaggtgtgaccccactgtagcagctgtgatggatgttttctctcaccatagcaataaataacacaacctcggtcacactgtatgcattgttggtctgcaaaatccatgttttgcaaaactcttcaggaaggtggatctgtaatattggcattgacatgagaacaacagcagtatttattcacaatctcaagctctctgtcttcccgtctctctcattagccatccaagtagtcctgaggaaccaagcccatcagaacattctgcaacataatacacagctccattctccattcaaattttgttgttgttgttgttgttgatgagacaacatcttactccatcagccaggctgacgtacagtggggctatctgggctgactgtagtcttgagcttccaggctcaaggcatcctctcacctcagcctcctaagtggcttgaactacagacacacagcgacatgctgggctagtttttgtatattttgtagagacgtgctctcaccatgttattcaggctggactcaaactcctgagcgtaagtgatccaagcaccttggcctcaaagtgctgagattacaagcctgagccactgcacccagcccaatctccattctactgataacaatgtcattaccaggtctgatggacaggaaatggtaaggtttctgaaaacctaaggatcacacagcgagttccaaaggctgaaagtgcatacctgtcgacactgataccaatgacatccaatggtgagaatgacattccttgtagtcctagctctgctcataacaaatctatactgaagtgtaagagtttgatggtcatggggattttccatgtctctgcctttcagcgatgtgccatatctgtgaagtgttcagaaatgcaacagcctgaggcatgctgggcatatcctctaataaaaaggaaaatgccattttatggtcctgtatttctacaagttggaacacatgggcctgtgatccagatgggggaaatgggaatattcccactcattcaccttcatccacgaagcccatttgaaagctttgggcttcccatccttgtagattttagtgttgtgggctgggtgcagtggctttcacctgtactgccaacactttgggaggcctagacaggtgaatccactgaggccaaaagttcgagaccagcctggccaagatggtgaaaccccgtccctactaaaaatacaaaaattagcaaggtattggggccagcacctgtaatcccagctgctcgggaggctgaggctggagaatcgcttgaacccaaaaggcagagactgcagtgacccgatcctgcctttgcactccacctgggcaagcagaacaaaacttctgtcttgaaaaaaaaaacaaaaaacgaacaaaaaagatgttagagttctgggtttagaggtctataccccagaaagagaatggtttcaacaagggacaaagaagttgctttaaacgttgacttgccatttcttttcagtgtgtttgttctcttgcgtcaagagaccaccagaaaagtggtgcaattactctcctgtcaagaatcattgactatcatctgcaagagggtcagatcctggtatataattagggcagaaatacttagtctgagaagggtatgacatccagaggccctattaatgatgtccttttctccatgcctgactctgaccccatgtgctggactgcccctgtgtggatggcctcatggcctgctcggactctgaggtcccaccccaagtggcacctccatggagggctctactcttgtatgggctctgacactcacactgagacactctcccatggacacctcttcacccacttggggtctgaaactgggctactccatccctccctaacctggaacagagagctttcactgctattacacaagtcatagaggctaactcctcatttttccaagctaattattgaaacattagtcctgggttgataagacaagataagttaacttttcataaatttgcttatcaagttttgaataaattcaaataaattcaccttccccacacaccttagttgtcgacatcacacgcgcacccatactcacagggtgagcacgaaggcttcactgtcagtggagaaagtggcaaaacccttctgtgcctcatcctggtctagacctggccctcatcctttcccactcttcccctcactcccttggattcatccacactggcctcctgcctgctgctccacctccctgcgaagctcacccctgcctcagggcctttgcacgtgcagtggcttcaagccatatcctcttcacccagatctcccagatctcctgaatgatcttcttttatcattcaggtctcagcttgcatgtaatcttctcagtgaggattacccaaaccacatagttcattcattcattcaaatattcattcaatggcatattgacaaagcagctacttcatgccaggccttgggccaggtgttatggatatggcaacaaacaaaacaagagttttctgctctcaaatttttacccacttaaaggagatatcatacatcatctgtaaataaatacatcatctgtaaataatgatgtaaataaatacatcatctgtaaatctgtaaataatgatgtaaataaatacatcatctgtaaataaataaagtataataaaagaaaatagtaggtttttttggttggaggtgaccgtgaagtttgcaaataccatcttacaacacattattttattttatttcatttcatttttaattttattattattatactttaagttttagggtacatgtgcacaacgtgcagatttgttacatatgtatacatgtgtgaagttggtgtgctgcacccattaactcgtcatttagcattaggtatatctcctaatgctatccttcccccctcccccaccccacaacagtccccggtgtgtgatgttccccttcctgtgtccatgtgttctcattgttcagttcccccctatgagtgagaacatgcggtatttggttttttgtccttgtgatagtttgctgagaatgatggtttccagcttcatccatgtccctacaaaggacacgaactcatcattttttatggctgcatagtattccatggtgtatatgtgccacattttcttcatccagtctatcattgttggatatttgggttggttccaagtctttgctattgtgaagagtgccgcaataaacatacgtgtgcgtgtgtctttatagcagcatgatttataatcctttgggtatatacccagtaatgggatggctgggtcaaatggtatttctagctctagatcactgaggaatcgccacactgacttccacagtggttgaactagtttacagtcccaccaacagtgtaaaagtgttcctatttctccacatcctctccagcacctgttgtttcctgactttttaatgatcgccattctaactggtgtgagatggtatctcactgtggctttgatttgcatttctctgatggccagtgatgatgagcatttcttcatgtgttttttggctgcataaatgtcttcttttgagaaatgtctgttcatatccttcacccactttttgatggggttgtttgtttttttcttgtaaatttgtttgagttcattgtagattctggatattagccctttgtcagatgagtaggttgtgaaaattttctcccattctgcaggttacctgttcactctgatggtagtttcttttgctgtgcagaagctctttagtttaattagatcccatttgtcaattttggcttttgttgccattgcttttggtgttttagacatgaagtccttgcccgtgcctatgacctgaatggaaatgcctgggttttcttctagggtttttatggtttgaggtctaacatgtaagtctttaatccatcttgaattaatttttgtataaggtgtaaggaagggatccagtttcacctttctacatatggctagcctgttttcccagaaccatttattaaatagggaatcctttccccacttcttgtttttgtcaggtgtgtcaaagatcagatagttgtagatatgtgacattatttctgaggactctgttctgttgcattggtctatatctctgttttggtaccagtaccatgctgttttggttactgtagccttgtagtatagtttgaagtcaggtagcatgatgcctccagctttgctcttttggcttaggattgactttgcaatgcggggtcttttttggttccatgtgaactttaaagtagttttttccaattctgtgaagaaagtcattggtagcttgatggggatggcattgaatctataaattaccttgggcagtatggccattttcacgatattgattcttcctacccatgagcatggaatgttcttccatttgtttgtatcctcttttatttcattgagcagtggttttagttctccttgaagaggtccttcacatcccttgtaagttgggttcctaggtattttattccctttgaagcaattgtgaatgggagttcactcatgatttggctctctgtttgtctgttattggtgtataagaatgcttgtgatttttgtacattgattttgtatcctgagactttgctgaagttgcttatcagcttaaggagattttgggctgagacaatgggttttctagatatacaatcatgtcgtctgcaaacagggacaatttgacttcctcttttcctaattgaataccctttatttccttctcctgcctaattgccctggccagaacttccaacactatgttgaataggagtggtgagagagggcatccctgtcttgtgccagttttcaaagggaatgcttccagtttttgcccattcagtatgatattggctgtgggtttgtcatagatagctcttattattttgagatatgtcccatcaatacctaattattgagagttttcagcatgaagggttgttgaattttgtcaaaggccttttctgcatctattgagataatcatgtggtttttgtctttgggtctgtttatatgctggattacatttattgatttgcatatattgaaccagccttgcatcccagggatgaagcccacttgatcatggtggataagctttttgatgtgctgctggattcggtttgccagtattttactgaggacttttgcatcaatgttcatcaaggatattggtctaaaattctcttttttggttgtgtctctgcctggctttggtatcaggatgatgctggcctcataaaatgagttagggaggattccctctttttctattgattggaatagtttcaggaggaatggtaccagttcctccttgtacctctggtagaattgggctgtgaatccatctggtcctggactgtttttggttggtaagctattgattattgccacaatttcagatcctgttattgctctattcagagattcaacttcttcctggtttagtcttgggaaggtgtatgtgtccaggaatttatccatttcttctagattttctagtttatttgcgtagaggtgtttgtagtattctctgatggtagtttgtatttctgtgggatcagtggtgatatcacctttatcattttttattgcatctatttgattcttctctctttttttctttattagtcttgctaccggtctatcaattttgttgatccttttaaaaaaccagctcctggattcattaattttttgaagggttttttgtgtctctatttccttcagttctgctctgattttagttatttcttgccttctgctagcttttgaatgtgtttgctcttgcttttctagttcttttaattgtgatgttagggtgtcaattttggatctttcctgctttctcttgtgggcatttagtgttataaatttccctctacacactgctttgaatgtgtcccagagattgtggtatgttgtgtcttttttctcgttggtttcaaagaacatctttatttctgccttcattttgttatgtacccagtagtcattcaggagcaggttgttcagtttccatgtagttgagcggttttgagtgagtttcttaatcctgagttctagtttgattgcactgtggtctgagagacagtttgttataatttctgttcttttacatttgctgaggagagctttacttccaagtatgtggtcaattttggaataggtgtggtgtgatgctgaaaaaaatgtatattctgttgatttggggtggagagttctgtagatgtctattaggtccgcttggtgcagagctgagttcaaatcctgggtatccttgttaactttctgtctcattgatctgtctaatgttgacagtggggtgttaaagtctcccattattattgtgtgggagtctaagtctctttgtaggtcactcaggacttgctttatgaatctgggtgctcctgtattgggtgcatatatatttaggatagttagctcttcttgttgaattgatccctttaccattatgtaatggccttttttgtctcttacgatatttgttggtttaaagcctgttttatcagagactaggattgcaacacctgcctttttttgttttccattttcttggtagatcttcctccatccctttattttgagcttatgtgtgtctctgcacgtgagatgggtttcctgaatacagcacactgatgggtcttgactctttatccaatttgccagtctgtgtcttttaattggagcatttagcccatttacatttaaggttaatattgttatgtgtgaatttgatcctgtcgttatgatgttagctggttattttgctcattggttgatgcggtttcttcctagccttgatggtctttacaatttggcatgtttttgcagtggctggtactgactgttcctttccatgtttagcgcttccttcaggagctcttttagggcaggtctggtggtgacaaaatccctcagcatttgcttgtctgtaaaggattttatttctccttcacttatgaagcttagtttggctggatatgaaattctgggttgaaaattcttttctttaagaatgttgaatattggcccccactgtcttctggcttctagagtttctgccaagagatcagccgttagtctgatgggcttccctttgtgggtaacccgacctttctctctggctgcccttaacattttttccttcatttcaactttggtgaatctgacaattatgtgtcttggagttgctcttcttgaggagtatctttgtggcattctctgtatttcctgaatttgaatgttggcctgccttgctaggttgcagaagttctcctgggtaatatcctgaagagtgttttccagcttggttccattctccccatcactttcaggtacactaatcaaacgtagatttaatcttttcacatagttccatatttcttggaggctttgtttgtttctttttactctctttcctctaaacttctcttctcacttcatttcattaatttgatcttcattcacttatatactttcttccacttcatcaaatcggctactgaaggtattgcatgcatcatgtagttctcatgccatggttttcagctctatcaggtcatttaaggtcttctgtacattgttttctctacttagccattcgtctaatcttttttcaaggtttttagcttccttgtgatgggtttgaacatcccctttagctcagagatgtttgttattactgaccttctgaagcctgcttctgtcaacttgtcaaagtcattctccatccagctttgttccattgctggtgaggagctgcgatcctttggaggagaagaggtgctctggtttatagaattttcagcttttctgctctggtttctccccatctttgtggttttatctacctttggtctttgataatggtgacctagagatggggttttggtgtggatgtcctttttgttgatgttgatgctgttcctttctgtttgttagttttccttcgaacagtcaggttcctcagctgcaggtctgttggagtttgccggaggtccactccagaccctgtttgcctgggtatcaccagcggaggctgcagaatagcaaatattgcacaacagcaaatattgctgcctgatccttcctctggaagcttcgtctcaaaggggtgcctggctgtatgaggtgtcagttggcccctactgggaggtgtctcccagttaggctagatgggggttagggacccacttgagaaggcagcctgtccattcacagagctcaaacactatgctaggagagccactgctctcttcagtgctgtcagatggggatgtttaagtctgcagaaatttctgctgccttttattcagctatgccctgcccctacagatggagtctacagaggcaggcaggcctcattgagctgcggtgggctcctcccagttcgagcttccagaccactttgtttacctactgaagcctcagaaatggtgaacacccctcccccacccagtctgccgccttgcagttccatctcagactgctgtgctagcagtgagcgaggctccatgggcgtgggacccactgagccaggcacaggatataatctcctggtgtgccatttgctaagaccattggaaaagcacagtattaaggtgggagtgtcccaattttcccagtacagtctgtcacgggttccctcatctaggaaaggtaaatcccctaaccccttgtgcttcccggtgacgcaatgccccaccctgcttcagctagccctccatgggctgcatccactgtccaaccagcccaatgagatgaacaaggtacctcagttggaaatgcagaaatcacccatcttctgtgtggatcaggctgggagctgcagaccggagttgctcctattcggccatcttggaatggcaatctatgtttgctttttacatttgaaaaaactggtgtcacgtacctaggtattaatcattgtggtatcctcttgccgatttacctctttatcattaactagtgaccctccttgtcttttgttgttacagtctgtgattttagtctattttatctaatatgagaatagctactctggcacttttttggtttccagcttcatgaaatatccttttccatttccctgttttcatttccctttcggtgtctctatagatgaagttgatttctttaaggcaccataagttgggtcttatttctttatccatttgaccatttagagaatttagaacactgtcagtgttattattcataagtaaaaacttaagagtgggtgtagtggtgtacatctgtatttcctgcactttgagagactgaggcgagctgatctcctggggtcaggagtttgagaccggcctggtcaacatgatgaaaccctgtctctactaaaaatacaaaaattagccaagcatgctggcatgtgcctgtaatccaatttacttgggaggctgaggcaggagaagcttgaacctgggagacaaatgttgcagtgagctgagatcacacagagaagtcatctccactctcctcatcagaacctcttgttcacagcatttgtgagcacaaatcaatgatggttattctttcctactaattagggatattttattacacagcaatagcctccagcaaagggaaccatcatacatgattcctacaagttgacagggctggaattatcactgaaaaactaaggtggctatacttgattcccaatgtccaatttttcatgaatagagaaatttatcctttttccccccagccagaaaccaagttttgctcttacgcccaggctggaatcaagtggcacaatctcagctcactgcaacctctgccccccagcttcaagaaattcaccttttgaacaaggagatattaaggatacactatgtgtatgctaccggtggttgcaggagactcagaaaagagagaaacagtcactggcctcgtgcaactgatattctcgggaggagagaaaggcaatcaagaaagaaacatgctgtatttcagacagctgtaagtcctccacaagaaaagaaagcaggtgaggaacataggaaatgtgtcaaccataaggttcccgctaattctataagttggtcagggatatcctccaagaataagcagcatctgagcaatcacctgaagggaggaaggaaggaagactgtgagtggtggcttacacctgtaatcccagcactttgggaggccaaggagggcagattgcctgagctcaggagttcacgaccactcagagcaacctgttgatacccaatctctactaaaaacacacaaaaaaattacccgggtgtggtggcacgcacctgtagtcccagcttccatgcccagctgatttctctctctccatatatatatatatatacacatatattgtttttgcagagatagggtctcactgtgtcacccagtcatcaagcaattctcttatactgttttggaaaagcatgggaattacaggtgtgaaataccctgctggtcctgaaaaatgtgatatttgggattctctgcctggcttgttttacccaaaataatgacctccagttccttccaggttgctgcaaaagacatgattttcactgttttataactgaatagtattcctgtatgtatacataccacattttctttatttattcttctgttgattgacatgtagggtgattccatgtctttgctactgtaaataatgctgcagcaaatatttgtgtgcattttgatctattcctttgagtaggtacccagtactgcaactgcaggactgagtagttgttatattttttgttctttcagaaatctccatagtgtttgccataaaatctgcactaatttacattcccaacaacaatgcataagatttccccttttctccacattctcactaacatttgttatgtttttgtctttttcataatacccattctgactggagtaagatatctcattgtggtggttgttgatatttttgagacggggtctcactctgttgccagactggagtgcagtggtgtgatcgtggcttgctgcaacctccacctcccgggttcaagcaattctcctgcctcagcctcccgagtagctgggactacaggcgcgtgccaacaggcctggctcattttttgtatttttagtaaagacagggtttcaccatgttggccaggatgatcacagtctcttgagctcatcatacacctgcctcagcctcccaaagtgttggaattacagtcatgaggcagcgcacccaacctcaatgtggttttaatgaccatttctctgacgattcatggtgtggagaatttctttgaaataccttttggccatttatatgtgctcttttaaaaactgactcctgtccaggtgcggttgagcatgcctgtaaccccagaacttcgggaggctgaggccaatggatcacttgaggcaaagaggcagaaatcagcctggccaacaaggcaaaaccccatctttactaaaaatacaaaaaatcagccacgggctgtgactcgtgcctgtggtgcaagttactcaggaggttaaggcacaggaattgcttgaacccggtaggcacaggtcacagtgagccaagatcatggcactgcactacagcatgggtaatagagaaagacctgtctcataaaaacaaatgaataaataaataagataaaaaataaaaaagtctctttatgtcctttgccgactttttaatgggattctttggagttttctgttgtagttgagatctttgtttactctcggtattagtcttttgtcaaaggaaaagtttacaaataatttcttccgttctgcagtttgtctgctcactctgttgagaggattatttctttggctgtgcagcagctttttgtttcagtaaagcttttgaatttatataattaaaattttcagtttggtttaaatttgcactggtcgatttttggttttgttgcctgtacttttgaagtcatactcttgaactctttactagacaataaccagaagagttttctctagttttcttctcacatttttattatttcagtacatatatttaagtctataattcatcttcaattgatttttgtagaaatagtgagaaataggagtccaggtttattcttctgcaaatgacaattcaattgttccagcaccaattattgaaaagggtgtgctttcctcaacgtatattcttatcagctttgtcaaagatcagttggctataaatgtgtggctttctttctgggctctctagtctgttacatcaatctgtgtgtctatctgtatactactaccatgctgtattggtgatgatggctttgtaatataatttgaagtcaagaaatgtgatgctcccagctttgtttatttgcttcagaaaggctgagtcaacagctgcagagatgaagctgcccctcctcgcagggctccttcccggaaaaagatcatggctcccactgaccatataaccatggctggaactcctgaaattcccaaagggaggccctacccagtgaggggggatgaatgaaggtcctacttaaggaatctgtctggccacaatcaggcacagcagctgtgctgccttgtgggggaccagaccacctggattccctggagcctgcaggctagaatgtctgagtccatggaaacacagaaatggaggccgccctcacctccccagaaaactgtagtctcaggcagtctccagccgattgccactggttggctgctattccaagccagtgggtcttaacttgagaggtgctgtggaagtggggcccacggaatgaggctgcttggctccctggattcagccccttttctaagggaatgtacagatggaactcccgccttgcccagctttccaagtatataaaactcctgagtctctgtgagtgtctgagcgagtgctctggcaacattcgacacggctctgtgtatctgacccaagacccttatggcatgagctaatgggaggatcttctgatccatgcgtggcaaagatgcatgggagaaacatggtttgtgggtaggggttgtgcattcactactgcttctcttggctgtaggtgaaggtttctttggctctgtgctgatactgggtgcaccatcacccaccccctttgtttcttctcctgggtcaagtcatttgcctaatcagtcccaatgtaggaacctggatacttcagttcaaggtgctgaattcaccgtgcttttcattcaggggaagacagctgcttctcattgggcatcttggcctgcccacttcacgtcactttttgtaaaatccacaccactccaggaatatccattacttaacttcgcctgaaataaacagaaggctcattacacttatcatgggctcacttacttcgcctataatgaaggtgccatggaaatgctagtggatgacgtggtccattttcttagggatgagatagaaaaatggtgtatggctttttaatttaattaaaatttttagtttggtttaaatttacattggtctctttttggttttgttgcctgtacttttgaagtcttactcgtgaactctttactggacaatgaccagaagagttttccctaagtttcttctgatattttgaccatttcagtacatacatttcagtctataattcactttaaattgatttttgtaaacatggtaagaaataggagttcagatttattcttccgcatatgataatgcaactgtcccagtaccaattattgaaaagggtgtgctttccctagtgtatattcttgtcagctttgtcaaagatcagttgcctatgaatgtgtggctttcattttggattctctcgtctgttacatcaatctgtgtgtccacatttatacctgtaccatgctgtattggtgactatggctgtgtaatatattttagagttaggaaatgtgatgctcccagctttgttcatttgcttcagctgaaaaggttgagtccacaattacaaagatggcagccgcccatccccggaggacctccaacccagaaagagatcaggcttcccaccaaccctataaccctggctggagttcctgaaattccaacagggaggaccttcccagtgaggagggatgaatcaaggtcaaatttaaagaaacagtctggccactatcaggcacagcagcagtgctgccttgtgggggacccctcctgctccagaccagctgccctccctggagcccgaaggctagattgtctgagtctacggaaacagagacggtggccgccccaaccacccagaactcggtagtctcaggcacttggcttgctatcttgccactgcttggctggtattccaagcccgtgggacttgagaagtgctgtgatgatggggaccacaggatgaggctgtctggctccctgtgatatggctgtgatgagtggaggaacaccagggctcatgtctcacacagaattggagaaaatgacacaaacacatgtacagtggttttatggcgtgcagtttaataggcaagaacgaaggaagagctccccatactgagacagagggaggggggctccaaagccaaaagaggaaacccggagtgctgtggataccaatgagttatatgaagaaactggagggggcggtgtctgatttgcatagggttcaggcgattggttcgaccaggcatgtcatttatgtggcccacggaaaaactggccctcccacctagcctttgaatatgcacgtgccggacaccctgatttcctacactcatggggatatatgggggtggccatatcgccaggcacaggtggggacaagggccagaagagggcgggaatcgctatgtttgggtggacccagtttctaatggccggcatctgcagatcaaggttaccggagaactctaaaagccggggctttcctgctagacaagactcatttctggagctgctttaaaaagaaacaaaacttcccaaggaccccttttcctccctgtctgcccaaaataatttcttaacaactcgtataacacctgaattcagcccccttactgggggaatgtaccaacggaactcccacctttcctggtttctcaaggctagattgtgtaaacctcctgggtctcggtctgtgtctgagcagctgctctgccaacactccacacagccctgtgtactaggcccaaggccgccgtgactcagcccatgggaggatctcctgatttcttggttgcaaagatccatgggagaaaaatggtttctggggcggggtcacacactcatggcttctcttggctgtgcaagaaggttcctttggctctgttccaatatagcgtggttcatcacccacccctgttttctttgttctcctgagtcaagttgtttgcctagtcagtcccaatgtgagaacctgaatatttcagttcacgtgcttatcgtgaaattcactgagactttaattcagtggaaggcagcctcttctaattggccatcttggcccgccccctccacgtcacctcccataaaatggccacgctctccagggacgatgccattatatatctttacgtgaaaccgacagaacacttattacactttttgtgagctcatttacttcacttataatgaacatggccatggaaatgctagtggagaaagtggtcgattttctgatggatgtgataaaaaaatggtttgccgaccaattaatgacatatgtctcaaaactagtaacgagacccttaatcgctgggttgaagtttctaatcaagaagatgctcatctatgtattcaacaaagcagcttcccttgcttctgaaatgcttccaaacaacatctcatatttcctgaagaagataatgcctggacaagcagcacaagtcattcaggtttactttcagctcataaatccagcaggatattcgcacaattgttgggaaaccttatcagttcatgagtcgtgcatgtttcctttaatttcaggaggaagagggtaatctggaagagtttcctgacctactctgctgctgtgattaaacaaccaccaggaaattttgatgacactgttctcctgagctcctccctttcctcggggaagaaaagcattgaaactacaaaaataaagtgttatttggctggagtgaggtctcatgtctgcttatgcggtggctcgctgctcagaacagggtgagtctctgagttgtacgctgaggaggggaggctgtcaatctagaaaaaacccattgcatgggacacctccatggggtctggggggctgaggatgaggagctggactggatctagggaaggaggaggtttcagagggtgaaattctggcagtaaatcctgggggtgtttgaaaacttcctccctcagaaggagaagactcagggaggaataaggacaaaccatgggtcccttgaggggcatttactaacttaagaggactttatcgggaagcagagtgacaatggcctccttgaggactgaggcccctggataaatgaggcccagatccagatccagtccatgggagatgagaccttcaagggacatatttttgttgggacagaggaaaagtgcagctctgcagctgcagaggaagccttggcagtgtgaaagcgaccttggagggggccctgtgcgttctgaatgcttctgaggtccatcccctgtccccgcctctttttctggattttttgggctccatggtctccgccatcttctgagcgctccacgctgccaccttcagttttctcttctgggctccaaatactccaaaatctttcatatctgtgcccctacccctgtttttagcatgtgttgggactccaggtccctgaaggtttctggcctgaaatccacctccccagcggtgtggattctgctctagagaccccgcacttggcaaggttcccaggcccctgggggacaaccgagtggtatgtgcacttcagggctccacactcggcaaggtctttcaagcccttggggttccctcctcagttttcttcacatgtctgggatgtagtcactctataaatgccgggatgtgatccccaccccagtgattttttttagttccatgagtgttgctatctgaatagtcatcctgagagtgatgggaccttttgaatttgcagcaagttttagattagtgtgagtggcctgagatcgcaaaactggggctagcattggatgtgaggttaggctggtggaaaaatttgcccagaacctgaggagtgtgggctcactgcaggtggttaggatcagcacagaattgcaaggatgtatagctttggggtaaagaataacatggttcagaagtacatgtattagtcttttcatgcattgctataaagaattacctgagactgggtaattaattataaaaactcaggtttaattggctcatggttccacaggctgtacaaaaaggatgatgctggccatcagctcaacttctggggaggcgtcagaaaacttagagtcatggcaaaaagcacaagggaatcaggctcatcctccatggccagagctggagctagtggtaggagaggtgctgcacacttttgaacaatcagatctttttagaactctatcaccagacagcacctagaggatggtgctaaattattcatgaaatatccacccatatgatccactcaattctcaccggcccaaccaggaccacctccaccattggggattacaattacacatgagatgtgggtggggacacagatccaaactcgatcagtgggcatcttggactgggtctactatagaagaagaaccaggagctgactatcatccttaagactgcccatgatggccaggcagggtggctcatgcctgtaatcccagcactttgggaagccaaggtgggtgaatcccctgaggtcaggagtttgagaccagcctcgccaacatggtgaaaccctgcctctactaaaaacacaaaaaattagatgggtgttgtgccagacgcctgtaatcacagctactccagaggctgaggcatgagaattgcttgaacctgggaggcggaggtggcggtgagccccaatcgcactgctacactccagcatgggcaacaataccaaaacatcgtctcaaaaaaaaaaaaaaaaaaaaaaaaggctgcccatgaccactgccccagtgagagggacaccagcatggctaagatcaagtgctggacattcttcatgggtcagacattaaagcaggccacactgttacagagatgggctccattcatagcaacaaagtggtgagaagatgtgggaatggcagaggccagcactttgccatcaatgcaaggtgggcataaggagctggcaccagtgccagagtgcatcaggggaggactgctttgcaatatctagcacttacctcttagagtatgtttcattagggacaacagatataaatggcagacaagtgagtcccttcagtaacaggaaatagaaatcatcaagaggaacagaaacagatgtcagcagccctcatataaagtcatcatccttcatccagttaaaacctgagacagttctcacataagaaggtctaattcaaaaagagactgggttctcatgaggcaggttcatgcaaaaccaagggaagtatacaactttgggattctccagcttcccttggaaaagacctacaatcatttgcttaggtaactgagcactgaacaaaggtgagtattgttatctttcagaagctgttggccatgaaggtcttgctggcataaaacccatggttggaaacatcaccatgacccctgttagagtaatggcctaagggcaagggtcaggaaattgatgtattccttgccaacttctgcgagacgagtgttggtccactcatctctttcacggaattcaccagtctggtatcttcaaaatccagaaggatgatggcagatggcaggaaactaatgcaaacaccatcagttgtacctccactgtagcagcagtaatggatgttatctcttcattgtaatatccagggagggagaagatgacattattctcaatattctaaacaccctgtgtgtacagcctctgtgatattttttgtaatatccgtgtgggagagaattatattactcctaatatctcaggggttgtgccccctctgtgacaatgttcctaacacccaggaggggataggatgatatcacttttagcatcacagggggtgtacaccccactgtaatattgttcataatatccgggggggagagaatgatattactcccaatatcgcaaagactgtacaccaacctgtgatattatttgtaatatccataagaggaagaataatattactcccaatgtcacaggaagtgtacacccttctgtgatattgttcaaaagatccagttagggaggggatgatattactctcaatatcttaaacaccctgtaggtaagccctctgtgatattcctcataatatccagagggagaggatgatattactcccaatattgcatgaagtctacaccccacctgtgatattgttcctaatatccaggatgggagaggatgatattactcccaatgtcgcaggggatgtacaccttccctgtaatattgttcgtaatatctagaaaaggagaggataatattactttcaacatcgcagggggtgtacaccttccttgttatattgttgctaatatccagggaaaaagaagatgacattaccaccactattgcagaaggtgtacacccccccttgatatagttcctaatatccagaaaaggagaggagatattactccaaatattgcaagaggtgtacattcccctgtaatatttttcctaacattcaggaagaaagagagtgatattgcccttaatattgaagggagtgtgccccccccgtgatattgtttctaatatccaagaaatgaaaggatgatattactcccaatatcacaggggctgtacagccccctcccatgatattgttcccaacatcggggggggggtgaaatagtattattcccagtatcacaataggtgtacacacctgtcgtgatattgttcctaatacccatgggggaaaggacgatattattcttaatatctcagagggatgtacaccctccctgtgatattgttcctaatatccggggtgggagaggatgatattacccccaaaatctcaaagggtgtacacccctcttgtgatattgttcctaatatccagggtggagaggataatattattcccaatatccaggaaaggaaacgatgatgttactgtgaatattccagggggtgtcctcccctctgtgatattgttcctaatatccaggttggggagattatgatatttctccaaatatcacaaggggtgtacaccaaccctgtgttattgttcctaatatcgatggggggagaggacgatattactcccaatatcacagggggtgtacaccacctttatgatattgttcctaatatccatgaagaaagaggatgatattactttcaatatcgcaggggatgtacactccccctgtgatattgttagtaatacctaggagaagaaagtgtgatattactcccaatatcgcaggggatgtacacgcttcctgtgatattgttcctaatatttagggggaaaggggatgatattactcccaatatcgaatggtgtgtacacccccccgtgattctttttttttttttttttttttttttgagatggagtcttgctctgccgcccagactggcgtgcaatggcgcaatctcggctcactgcaacatttgcctcccaggttcgcacgattctcctgcctcagccttcggagtagctgggattataggcagctgtcaccataccaggctaatttttgtatttttagtagagttggggtttcaccatgttggtcaggctggtcttgaattcctgacctcaaataatccacccaccttggcctcccaaagtcctgggattacaggcataactttccctgtgatattcttcctaatattcaggaagaaagaggatgatattgctcccaatatcgcagagagtgtgcactcctcctgtgatatggttcttaatattcagaggaggagaggatgatattactttctatattgcagaaggtgtacacctccctcgtgatgtctttcctaatatccagtgggggagaggttattagtctcaaaatcacagaaggtgtaaacccccatttgatattgttcctaatattcaggggtggggagagaaaggtattactcctagtatttcagggcatgaacacccccaccgtgatatcattcctaatatccagaaggggaggcaatgatatttctcctaatatcacaaagggtgtacaccccttctgtgatattgtaaatattctgtgtgtacacccccctgtgttatagtctgtaatatccgggtgggggagagggtgatatttctccccatattgtaggggatgtacacccttctgtgatatggttcgttatatccagggaagaaaaaggtaatattgctgcccatattgtggagagtgtacacccccatgtaatatggttcgtaatatccaggagtggagagggtgatactgctccttacatcgaggaaggtgtacaccttattgttatatgattcgcaatatccaggggaggagagagtgatattgctccccatgtcgcagggggtgtaaaccctccgtgatatgattggtaatatccaggaaaggaaagggtgatatttctccccatatcgcgggggacgtacatcctcctgtgatatggttcgtaatatccaggaggaaagaggaaaatattgctcttcataacccgaggggtgtacaacccctgtgatatggttcgtaatacccagaagtgtacacccctctgtgatatggtttgtaatatccagggggttagagggtgatattgctccccatatcgcagtgggggtacacccccctggattggttcataatattcatggggggagaaatttacatttatcctcatatcagggggggtgtacaccccccgtgatatggttcgtaatatccaggggaagaaagggtgatattgctccttatatcgcggaaggatcaccctcccctgtgatatggttcataatacccagacgggaagagggtgatattgttcttcataaagcgaagggtgtacagccccctgtgatatggttcataatatgcaaaaggggagagggtgatattgctccccatatcacggagggtgtactcccttctttgatatggttcgtaatatccaggggtgtagatggtgatatagctcgccctattggggagggtgttcacccctctgtgatattgttcgtaatgtccagggaaagagaggatgatattactcccaatatcgcagaaggtttacaccactctgtgatattgttcataatatccagggaaggagaagacgatattactcccaatatggcagggggtgtagaactcctgtgatattgtttgtaatatccaggcaaggagaggatattactctcaatatcgcagaaggtttacacccctatgtgatactgttcatgatatccagggaaaaagaggatattactccctatatcacaaagggtgtacacccctttgtgatattttttgtaatatccaggggagagaggataatattactctcaatatcagaaggggtgaaaaccctcctgtgtcattgttcataatatttagggaaggagagagtgatattactccaaatatcacagtgggtgtacacccccctatgatattgttcctaatttccagaaggggagatatgatattattgccaatatcgcagaaggtgtacaccttactctgacattgtttgtaatatccagatggggaaatgatgatattactcctaatatcacagggggtgtacacccccttgttttattgtttgtaatattcaggggaagagacgattatattactcccaatatcgcagggtgtgtacaacactctatgatattgttcataatatccaggggaggagaggaagtgtacacccccccgtgatattgttcgtaatatccagaggtagagaggatgatattactcccaatattgcaggtggtgtacacctttctgtgatattgtcatgatattaagaaggggagaggatgatattactaacaatatcacaaaaactgtacactccctgtgatattgttcataatatccagaagaagggaggatgatattattctgaatctcgcagaagatatacaccaccctgtgatatggttcataatatcctaggggaaagaggatgacataactgtcaatatcgcagggggtgtacaattccctgtgatattgttcacaatattcagagggaaaaaggataatattactttcaatatcgcaggcggtgtacacattactgtgttattgtttataatatccggaatgagagaaaattttctcccaatatcacaggaggtgtacactcccctgtgatattgttcgtaatatccagggaggggagaggatactattactcccaacatctcagggagtgtaggccccccctttgatattgttcctaatattcggaagtggagaagatgatattacttccaaaatcgcagggggtgtacactccctctgtaatattgtttctaatattcatgagtggaaagaaagatattactcccagtattgcaggggacatacaccacactgtgatcttgttcacaatattcgggggggagaggatgatattactcccaatatcaaagtaggtgtacacccccttctgatattgatcgtaatatccagaattaaagatgataacgttactcccaatattgcagggggtgtacatttttgaatactgttcataatattaagagggggaggggatgatatctgtcccaatatcgcaaagtgtgtacacctcctgtgacattgtcccaaatatccagaggaaaaaaggatgttattactcttaatatctcagagagtgtacacctccctgtgatattgtttgtaacatccagaagaaagaggctgatattactcttaatatcgcagggggtgtacacccccgccccgggatattattcgtaatatccagggggaagtggaatgttcagaatgggagaggatgatattacttgcaatatcatagtgggtgtacaccccactgtgatattgtttgtaatatccgggaaaggagaaaatgacattcctccccatatggcaggggctgtacaccacctatcatattgttcaaaatatccagaaggggagaggatatgtctccaagtatcacagggggtgtacaccccgctgtaatattcttcctaatatccagggtgtgagaggataatagtactcccaatatcccagggcatgtacaccccccttgtgatgttgttcctaaaattcatggggagaaagaatattactcccaatatcacagggggtgtacatacactctgtaatattgttgccaatatgcagcaggagagaggatgatattactcccaatatcacaggggctgtacaccccgctgggatattgtttctaatatcaagggggaaaaaggatgatattactcccaatgtcgcagggtgtgtacttcctctttgtgacattgttcctaatatccaggagagaagagggtgacattccttccaaaactgaaaggggtgtacacaccctttgagatattgtctttaatatccagaacgaaacaggatgatataactcctaatactgcaggggggtacaccctctctgtgatactgtttctaatatccaggaggggaaagaaaaatattaatcccaatatcacagggggtgtacattccccctttaatattgttcctaatatccaggaagacacaggatgatactatttccagcagcacagggcatgtacacccctttgtgatattgttcctaatatccaggaaaagagaggatgatattactgtcaatattgcagggcgtatacactggttctgtgatattgtttctaatatccgggggtggagaaaatgatattactcccaatattccagcgggtgtacacccgttctatgatattgttcctaatatctgggggagagagaatgatattattgtcaatatcacaggggatgtacagattccctgtgatattgtttctaatattcacagggggagaagggtataatactcccgatatcgcagggggtgtacactccccctgtgaagttgttcctaatatccagggattgagagaatgatattactcccaatatcacaggcggtgtaaaccccctgtgtgatattgttcctaacatccagaggaaaagatgatgatattattttcaatatcacagggggtgtacgcatccctgtgatattgtttctaatatccaggggaggagaggatgatattattgttaatatcgcagggggtgtaccccaccctgtgatactgttcctaatatccggggtggaagaggataatattgctcccaatatcgcaaagggtgtacaaccttcctgagatattggtcctaatatccagggagggagaggatgatattactttcaatatcacagggagtttacacaacccctgcgatattgttcctaatatccagcggaagaagagttaggataatactattttcaaaattgctgggtctgtaccccctccccgtgatattgtttctaatatccaggaggggagaaagtaatatgactcccaatatcttagaagatgtacaccctccccataatattatttcttacatccagggggtagaggatgattttgctttcaatatcacagagggagtaaacctttccggtgatattgtttttaatatttaaaaagagagaagataaaattactcccaatacaaaggggatgtattgtgtactcccccctctgatattcttttttaatatccagatggagagaggatgatattactttcaatattgcatgggatgtataaatcccctgtgttattgttctgaatatacaggtggggagagtatgatattactccaaatatcgcagggggttctttccccctgtgatattgttcctaacattcagggagggagaggatgatattactcttaatattgcagggggtgtacccacgcctatgatattgttcctaatatccagagggggagaggatgatctaactcagaatatgacaaggggtgtacacacagcctgtgatatggttcctaatatacaggggagaaggggataatatttctcccaatatcgcagggggtgtacaaccccctgtgatactgttcctaatatacagaaggggacagcatgatattgttcctaatatcgcaggaggtgtacaacgccctgtgatattgttcctaatatccagggcgggagaggatgatattaccctcaatatcgcagggggtgtgcactttccctgttatattgttcctatgatccgggtggggggaaatgacattagtcccaatatcgcaggatgtgtgcaccgctcccccgtgatattgttcctaatatcaagggggagagaggaggatattactcccaatatcgcaagggatgtacatcctccatgcgatattgttcgtaatattcaggaggagagaggatgatattactcttaatatcgcagaaagtggacacccaccctgtgatgttcttcataatatccagggaagcagacgattatatgactttcaatatcgctgggagtgtacatcccttttgggatattgtttctaatatccaggaagggagaggattatattactctcagtattgcaggcagtgtacaccttttttgtgatattgttcctaatattcagaaagggaaaggatgatattactcccaatattgcaggtggtgtatatccccctctgatattgttccttatatcaaggaagagaaagaataatattactcccaatatcaaagacagtgtagacccctcctgtgatattgtatttaatatccatggggaaagaggatgatgttactcccaatatcgcagggggtttacacccacactgtgatattattcctaaaatccagtggaggagaaaataatattgctcccaatattgcagggtgtatacaggccctcccccgttatattgctcctaatatccagcggtggagaggatattactttcaatttgtgtagggagtgtatacccccctgtgatatttttctaatatcaaggatgggaaaggatgacattactcccaatatcgcaggaggtgtacacgccctgtgatattgttcctaatatctagggaaggagaggatgatattactttcaatattgcaggagctgtacaccctctgtggtattgttcttaatatttaggttgggagaaaatgatatgagtccaaatatcgcagaaggcatacacacttccaataacattgttcttaatatccgggggagagggtgatattactcccaaaatctctggggggtgtacacccccttctgatatttttcctaatatccagggaaggaaacgatgatattactataaatattccaaggagtgtacaccttcctaatatcctaatattgttcctaatatccaggggtgggagaggattatattactcccgatatcgcagtgggtgtacacccctcctgtgatattgtttctaatatccaagctaggagaaaatgatatcactctcaataccacagggggtgtacaccttccgcatcatattgttcctaatattcagagggaaagaagatgaagttactttcaatatcggaggggttgtacacaacccctgtgatattgctgctagtatccaggaagaaaggggattatgttactccccttatagcagggggtatacacctcccctgtaatattgttcctaatatcaaggctgggatatacgtggggggaaggatgatattactcccaatatcgcaggggttatacaaccttctgtgatattgctcctagtaaccagggcagaagaagatgatattactcctaatatcgcaggaggtgtacactcccccattatgttgttcccaatatgcagaaaaggagaggatgacattattgccagtatcgcagggtgtgtacaccacccctgtaatattgttccaaatatttagggggagagaggatgatattactcccaacatcgcagggggtgtacacacatcccctgtaatatagttcttaaaatctaggggaaaaggggatcttatttctctaaatattgcagagggtgtacactccccggtgatattgttcctaatagccgggagggagataattaaattactttcaatatctcagagagtgtacatcgcccttgcgatattgttcctaatatccagagcaaaagagaatgatattactcccaatatcttaggagtgtacatttaacctgtaatattgttcctaatatccagggggaagagaatagtattactgccaatatcgtaggggttgtacaccttttctgtgatattgttgcaaatatttagtagagggaaagaatattactcgcaatatcacagggaatgtatacttcccctgtgatattgttctgatatccagaaaaagagagggtaatattactcccaatattgcagggggtgtacaccccccttgtgatattgatcctaatataaaggaaggaagaggatattactcctcatatagaaggggttgtccaccccccttgtgatattattcctaatattcagggaagcagaggatgatattattttcaatatcacagagggtgtgcagtccacctgtgatattgttcttaatattcggggggagaggatgttattatgcctgatatcgcagtagaggtacacccctcaagtgatactgttcctaataaccaggggtgaagaggatgatattactcccaatatcgcaggtggtgtacacccccccatgatggtttctaatatacagagggggagaggaaaatattactcccaaaatcgctggaggtctacaccccccttgtgatattgttcctaatatccaggaaaggaaacgatgatattactgtgaatattccagggggtgtacacccgctttgtaatattgttcctcatatccagggtgtggagaggattatattactcccagtatcgcagggggtgcacgacgcccctgtgatattgtttttcatatccaggaggggagattattatcaatatggcaaggggtgaacaccccctgtgatattgtacttaatagttaggttggcagaaaatgatattagtctcgatatcgcagggggtgtgcactccgcctggtgatattgcttttaatatcaagggggagaaaatggcattactcccaatatcgcagggggtgtacaccgctcatgtgatattgttcctaatatccaggtggagagaacataatattactcccaatatcgcacaaggtgtacacccctcctgtgatatggttcctaatatccatgggaggagatgatgatattactcccaatatcacaggggatgtacaccacccttgtgatattgttcctaatatccagggaagaaaacgatgatattattgtgaatattacagggagtgtacacactccctgtgatattgtttttgatatacagggtgggagaggatgatattactcccaatatcacataaggtgtacaccccccgtgatattgttctaaatatttcggtggggagaaaatgatattagtctccatatcacagggggtgtgtgctcctcaggtgatattgtttttaatatcaagagggggaggagattatattactttcattatcacagggggtgtacacccctcctgtgatattgttccttatatccaggcgaggggaaaataatattactctcaatatcgcaggaggtgtacacaccccatgtgatattgttcctaatattaagggggaaagaagataatattactttcaatatcacagggtttgtactcctttcttgtgatatagtttttagtatccagggggaaagagcatgatattactcccattgtagcaaggggtgtacacacctcctgtgatattgttcctaatatccagaagtggtgaggatgatattactcccaatatcgcagggggtatacaccccacctatgatattatttctaatatccatgggaaaagagtatgatattacacccaatgtcgcagagggtgtgtatttttcctgtgatattgtttctaatattcaggcggggagaagatgatattactctcaatatagcagaaattgtacatccccgctgtgatattcttcataataatcagggaaaaagaggatgatattactaccaatattgcaggggggttacacttcccctatggtagtgttcctaatatccaggaagaaagaggatgatattaatcccattatccaggaagtgtacacccaccctgtcatgttgttcctaatatccagcagggaagaggatgatattacaccccccccccgtgatattctccttaatatccaggaggggagaggctgatattactggatatatagcaggggtgttcataccttctgtgatattgttcctaatatccagaaaaggagaggatgatattacttccaatatcgcagaaggtgtacacctccctgtgatattgatcctgacattcagaaggggagaggatgatattactcaaaataccgcagggcatgtgcattcccttgtgatattgttcctaatacccagaagggaacaggataatattactttcaatatcgcagggagtgcacacccccctttggtatggttcttaatatccagaaggaaagagggtgctattactttccatattgcaaggggtgtacaccccactgtggtatggttcataatatccaggcagggagagggtgctattactccccacagtgcggggcatgtacaccctgctgcggtacggttcctaatatccagggggagagaggatgctatgactccctatatcgcggggtgtgtacacccctgtgtggtatgttttgtattctccaggaacggagagggtgttgttacccctcatatcgctggaaatgtacactcccctgtggtatggttcgtaatatccaggggattgagggtactgttacccccatactccccatatcgtggggggagtgcacctccctgtggtatggttcgaaatatccagggtaagagagggtgctattattccccattttgcaggaggcgtacacccccctatggtatggttcgtaatatccggggtgaggggatgctatcaaaagaagagagaaagagaccccccatattgttctatattattttatactcagtacctgttttaagaagaaacaaggaagtgaaaccaaaagcaggcagcccggcgccaggcaccagacccaaaaccagacccgaaaccaggcctgggcctgcctgaccttagcctgatagttaaaattcaacccatgacctagcaaccaatgttatccatagattccagacattgtatggaaggacattgtgaaatttcttgttctgtgctgtttcactctgattaccggtgcctgcagcccctgtcacatacccactagattgctcaatcaatcatggccctttcatgtaagatctttagtgttgtgagcccttaaaaaggacagaaattgtgcactcaacaagctcggattttgagacgctagtctttcgatgcttccagctgattaaaagccacttccttcactacctcggtgtctgtggggttttgtccgcgactcctcctgctacactatgactccccatatcaaggggggtgtacacccccctgtggttcgtaatatccagcaggggaaaaggtgctattactccccatattgcagggagtgtacacccccttgtagtatggatcgtaaaatcaaggggggagggaaggtgtaattatccccatatctcagggggtgtacacccctttgtggtaaagtttgtaatatccagggatattacagggatattatccccaaattaatacttttataatttcttatgcctgcctttactgcaatctctgaacataaattgtgaagatttcatggacatttatcacttccccaatcaatacttttataatttcctatgcctgtctttactttaatctcttaatctcatcatctttgtgagctgaggatgtatgtcgcctcaggaccctgtgatgattgcattaactccacaaattgtttataaaacatgtgtatttgaacaatatgaaatctgggcaccctgaaaaagaacaggataagagcgatgttcagcgaacaagggagataagcataaggtctgactgcctgtggggctgggcagaacagagtcacatttttcttattgcagaaaatgagtaggagaaatatcactgggaagggaacgcattcctaggggaggcctatggacggccgctctgggggtgtatcccttatgtggttgaagataagggatgaaatacaccctggtcccctgcagtgccctcaggcttgctaggattagaaattccagcctggcgaattctagtcagaccagttctctgctcttgaaccccgtttcctgttaagatgtttatcaatgacaatgcgtgcacagcaggacatggaacctcaatagtaattccattttctccctggccttgtgaccttgctaggcccttctgcccttgtgatcttttattgccatttgaagcatgtgatctctgtgacccactccctattcgtatccccctccccttttgaagtccctaataaaaacttgctggttttgcagatcaggtggtcatcacagaacctgccgatatgtgatgtcaccccggaggctcagctgtaaaatttctctttcgtactctttcactttatttctcagaccaggtgacacttaaggaaaatagaaaagaacctactttgaaatattgggggctagttcccccaatagacattgttcctaatatccagaaaaaaagaagatgatattactcccaatatcacaggggttgtgaaccccacctgtgatatggttcctaatatccaggaagggagagaatgatattactctccatattgcagggggtgtgcacatccctgtgatattgttcctaatatccaggggaggagagggtgatattactcccaatattgcaagggttgtaaactccaccctgtaatattgctcctaatatttaggatttagggggggagaggataatattactcccaatatcgcaggggatgtatatgccctctttgatattgttcctaatatccagggggggagaggataatattactttccatatcacaaagagtgttcacccccctgtgatattgttcctaatatccaaaaaggaagaggatgatatcaatcccaatatcacaggaagtgtacaccccccccttttatattgtttctaatatccaggggaaatgagggtgatatttctctcaatatagcagaatgggtacactccccctgggatattattcctaatatccaggggaaaaaaagaggttgatattcttcccagtatagcagggaatgaatacaccctttgtgatattgcttctaatatcaaggggaaaagaggatgatatgactcccaatatcacaggggatgtaaacctgtggcgttgttgctaatatcaaggagggaagagtatgatattactcctaatgtcgccgaaggtgcacactttccctgtgatattgttcctaatatccaaaagggaagagaatgatattacccccagtattgcagggtgtacaccacccctgtgatattgctcctaatacccaggaaaaaagagaatgctattacccccaatatctaaggggacgtataccttccctgtgatattgtttctaatatccaagtggggagaggatggttttactctcaatattgcagggagtgtacactccccctgtgatactgtttctaatactcgggctgggagaaatagtattactcccaatatcgcagtgatattgtttccctgtgatattgtttctaatatctagtgggggagataattatattactaccccatacacaggggagggtgtacattcccctgtgatattgtttgtaatatccagggaaggagaggatgttactcccaatatcacaggggttgtacaccccttttttgatattgttcctaatatctggggggcagagaattatattactgtcaatatcacagagtgtgtacaccccctctgttatattactctttatattcagggcggtagaggatgatattactccctatatcacagggggtgttcacccctcctgtgatattgtttataatatctaaggggaaagaggatgatatcactctcaatatcaaaggaaatgtacacctttcctgtgatattgtttttattatataggggggcagaggatgatattaagaacaataccacaggggatgtacacccacgtattgatattgtccctaatatgtatggggaaagaggacagtgtaactcccgatatcgcagagtgtgtacacccccttgtgatattgtttctgatatacacggggagaaaagataatatttcttccaaaattgcagggggtgtacaaccccctgtgatattgtttttaatatccagtgggggagagaatattactcccaatattgcagggcgtgtacacaacccctgtgatattgttcctaatatccagagtaggggaggatgacattactttcaatatcgcaaggggtgtacattcccctgtgatattgctcctaatatccatgaggggagaggatgatattattcctaatatggcaggggctgtacaccttccctgtgatattgtttctaacatccagtgggggagaaaatgatattactccctatatcacagaaggtgtacactttccctgtgatattgttcctaatatccagaaggggagaggataatattactcccaatatcgcaggaagcttacaactcccctgtgatattgtttctaatatccagggaggtagggatgatattactcccaatatcgcaggggatgtacactcccccgtgacattgtttctaataaccagggggtgagaggatgatattacgcttaataccgaagggggtgtacacacccttgtgatattgtgcctaatagccagggggaagaaaattatattaattttaatatttatggggaaaaaggatgatattactcccaatatcacaggggctgtacaccgaccttttgatattgtttttaatatccagaagagaagaggataatattgctcccaatatcagaaaaggtgtaaaccccttctgtgatattggtcctaatatccagggagggagagaataatattactaccaatatcacagaaggtgcccacccccaaggtgatattgctcctaatatccaaagataatagggtgatgttactcccaatatcacaggaggtgttcacaccccttgtgatattgtttctaacgtacagggaagggagaggatgatattattcccaatatcacaggaggtgtatactcctctgtgatattgattttaatattcggggggaaaggatgatattactccctatatcgcagagggtgtacaccctctgtaatattgatcctaatatccagggcgggataggatgatattactcccaatatcgcagaaagtctacacaacccccagtaatattgtttttactatccagggggaagaggatgacattactcccaatttcacagagtgtgtacactcaccatttgatattgtttctaatatctagggggagagaatatattactcccaatatcacaggaattgtacaccacctctgtgacattcttgtgaatatccggggaaaaagagaataatattactcccaatattgcagagcgtgtacacccctccatgatatcgatactaatatttttttaaagaggatgatattactcccattgtcacaggatgtgtacaccccccttgtgaaattgttcataatattctggggggagagcataatattactccccatatcgaaaaaggtgtccaccctccttataatatggttcctaatatccaggatattacttaatccaggatacttgtaataccctaaatatacaattgcttgaacctccacctcccaggttcaagcaattcttctgcctcagcctcccgagtagctgggactacaggggcacaccaccacacccagctaatttttttttcttgtatttttagtagagatggggttttgccatattggccaggctggtctcaaactcctgaccttgtgatctgcccacctcagcctcccaaagtgctgggattataggcgtgacccaccgtgccaagccaggaagaggatgctctatagatttccccaataagagatggctttgcagggccattccaaaatatgtcaaagaaatacatttggggataaaatactttgatttcctttagggaatgttatctattatgtgatgctataccagagtcaggttggagtcggttatcttattgcaacaaagagtctgttccgtcactgttgggatctctattttttcctcttatttcttgagacagggtctcactctgtcacccagtctggagtgcagtggtgcgatcttcattcactgaaacctctgcctcctgtgttcaggtgattctcgtgcctcagccccttaagtaactaggattacaggtgtgcgccaccacacccagctaatttttgtattttcagtagagatggtattttgccctgttggccaggctggtcttgaactcctggcctcgtgtcatctgcccacctcgacctcccaaagtgctgggactgcaaatgtgagctattgtgcccagccaggatctctgttttaatgttagtgctggtcactttgcatgaactccaaagggaagaaatataatgaggtgtgtctgaccccctgccttctcatcgtgacctgaattagtttttcaggtttgcaggggatacccttggacaagaaggggctctattcggttggttggggggattagaattttactttttgtttacaatatttctcctgaaagagttaggggctcacaaggaatttccgcgtgagcaacttatgaggaaagccatctgggaagatatgtgtccttgtgtcactgggatattctcgtttaccccaatgatacggcaatgacgcagggttgtgaaattacagctatgtgtttggggaaaaaagaaagcaggattgtgtgactacgtttccaaacttcacttgcccttagccatagtgagttgggggcctggagattctgttttctttcacaatgatatagatacaattaaatgtatagaaagcaaaaaaataaaaaggtgagtaatgaggaacctctgattcctgagtggccatgtagttacccatggcacagagccacagttactgaaggtaaagtttgctggggaatttagaaatgaatccagctcttggaggagtcagtttactggatgcctaagaaaatgcaaacaaaataagaaaaaagggtaatattcaatcccatagttattgttacctgtcatagctaaagtaaaattaaaacagagtgctggcttcaatcttgatgctacactaagcttagatttcagtgaatgtgagtctcagccactagctcagagccacctcccaaagaccaaatcatgtagggacaatagaaagtacttctgagaattgtggttaccaagaacctagtaactgttggggaggagcaaaacaaagtacagaaaccagagggtacaatctgagtgagactgctatcagcttctggaggagcctttactaaaatgaatgatgagagtaactggatgatgagagtaactaatggatgatgagagtaagcaatgtctttggttttcttttttttttttttttttttttagcagacgtctcactcttgtcgcccaggctggagtgtaatggcatgatctcgcctcactgcaacctccacctcctgggttcaagcaattctcctgtctcagcctcccgagtagctgggactacaggcactcatcaccacacctggctaatttttgtatttttagtattttctggtgagggtccaggtttccggaaacaactcagagacatatgttaagatgttatctttagttttcacagggaaccaaatatgttacgactccaatttccttggctattgttttaagttaccattaccttctcgttgatcaagttgctcatttacttctcaagcctagctagatgcctggaatttcccttgaaggaagtcaagattttcctttatctccatactggctgatggtgatcgagtaagcccctaagaggggtccctgctccatctcgagatgctgctagattctacagtgcctaataaacagctctcgcctggccgacaaagagctgcttgctctctggatagcaattccaaagtgaacagacaacatcctgtttggaagactgccactctgttagaagaagcatcaggaaaacctttcttttgagctatttataactaacagcaattgaccaagtatacttttgtgagtgaaactgacctttctccctgtaagaattctccaaaatttggaaactatttgtgagtatttttacttatggcaatataattattggcacaagctcaatcagattcggttttctttcgtaacaggaaccattggagatactcattactctttgaaggcttacagtggaatgaattcaaatacgacttatttgaggaattgaagttgactttatggagctgataagaatcttcttggagaaaaaaagactgggtatattttcaatatgctttccttttaaggtccctcacctgtggaaagtaaagaatgtcactttctgacaggctcaggaacctcaagttatgtagggatctcaagaagatgggggaattcacccagttcatacaggtgaaattgctgttgcaaagattatgaatatgagagaagtccagcatggctgacttcatctcgtgtctggcctcaggctggctgcccttgctcactcttgggcataggccaagctagccatgggaggaatttagtttatagtttaactttgaagcacggatgataatagtctctccctaaaatgaaccccttccttgctcagggactgaaactacctttgtatgacaaatgaaagcccacaagattaagattatgagaggggcctgaattctgctaaaatgcaggtgtagctgactgataacaagtcattgtcccacagcttgcctttctataatctcttgcttctcaggagtcacatggccagaggtcctgagatttccagtcctgtgacccccacccagagatggacttagtgcatgaggaccattttccacacccctatgatttcatcctcaaacaatcagcagcaaccattccctagccccctgccttccaaattatccataaaaatcctagcctctgagttattagggagattgattaataatcccagtcctaccccttgggttgctctgatttaattaaaccttctctactgcaataccacggactcagtaaattggttttgtctgtgcaatgggcaagaagaacatgttgcatggttatacaggtactacaagcacagtctgatggcaaattattggttttgcttcctgcccttgatgtttctaaacatctagtccaaaattacttgtgaaaggtccagcaaagccaattttaaaagaggctatatggccaatcactattctttctacacattattgcaaataatcaggccacggctgggcacggtggctcatgcctgcaatcccagcactttgggaggctgaggcaggatcacctgaaatcaggagttcaagaccagcctaggcaacatgataaaaccctgtctctactaaaaatacaaaattagccaggcatggtggcatgcacctgtaatcccagctacttgggagactgagggaggagaatcacttgaacctgggaggcagagattgcagtgagctgagatcacaccactgcactccagcctgggcaatagagtgagactttgtctcaaataataataataataatcagaccaagtataatgaaattaaaatttattttgcaaataaattggtcctactacaatttatccttcatagaaatgtggaaactgaagataaaaaaaattaggtttcagaagaaaactatactacacctgttattagattctagccctaaacattgtttttgaggtttttattatttacctgcaatttggtctaaattctgaattatttcctgactacaagtatccaaggaataaatgggttttctttttctttatgatagttttagttggcttctaatgcaacaacaatttttattgtaatcctgtgtgcattctattcctactattcaaattattaatgttatagatctttcattgtagtacttctgaattaaccaaaatcacagtattctgaagatgattctacaaagcctgctgtttctacaaaggctgctgatgatttctacaaagcctgctgtagtgttgctgtggcctctgcttaaaaaagtagaaaacacattgatgcagcatgttcaccccaacctccctgcctaaaggctcagggaccatcttggaagaggaaggcgcgtgagattgtaagagccgaattagggggatggagtgtggagaataaggacacttcatcttggatgctcacctgccaaattgacttctgatgaaagccagctccagaaatgtgcctacagttactactttcacctaaaccctgcccttagtcaaatccttctcttcttctaagcaatcaacttcaattccttgtataacccacagtataaaagggcttttataccattctatcctattgcatgtaagccttgggtctgggaggtaacagtgtgggattccaccatctcatctccctgccacccaaacatgcctgctcttctttaagcaatattaaatgtttgtacttcagaaatttgatttgtcagcctcttcttcagactctcagcttctttggcctttgggagtaaatttgcataggcctgctcaaaacaggatgttctgggggtttgggggtgttgttttgttttgttttttgttttgtttagagacagggtctcactctgtcacccaggttggagtgcagtggtgcaatcatggcacactgcagcctcaaactcctaggctcaagcaatccccccaccttggcctcccaaagttctgggattacaagcataagccaccatgcccagccctggacttttctttaaagacatttacacagtgtaggaattactgtgggtgcactgctcaggtccccttctccaggatgctcattcctacctcatagatgattttcctgcagagatttgacctcagctgaagggcagtcacctggtccaggtggttgctattcacctccttcctgagaacagccaacagccagggacacgctagcacagagatataagagcgaccaaggtgaggccccttctgtgctgcggtgcatgctccagagcctccctgggatcagacttaagagggtctccagccagatctggtcttcgctgctttcctcgagctccccagcgcactcctgcaatgcatcttttttttttttttttttttttttgagacggagtttcactcttgttgcccaggctggaatgcaatggcgcaatctcagctcaccacaacctctgcctcgcgggttcaagtgattctccttcctcagcctcccaagtacctgggattacaggcatgcaccaccacgcccagctaattttgtatttttagtagaaacgggtttctccatgttggtcaggctggtttcgaactcctgacctcagttgatcctcctgcctcagccttccaaagtgctgggattacaggtgtgagccactgtgcctggcccaatgcacctcttgaatcacctcctcatgctttgcttttagagaacatgatccccaacatgtgattccagcaaagattctagaaagccaaccgtgacaatcacttctgggtttagatgacccccccccaccacaagatggcagtgagcacctcatcacagaggtgctgatggtctgcagcaccgcgccaggccagaacgtgccttttacagaagaaaataacccagtagctgactaggatggtgaggagggctggtgagcactgcggtagtgagagggacactagcatcactgagatgcaagtgatggtcatttttcataggtcaaagctcaaagcaggggacagttacagggcagggcttcatagcaccagtgtgatgaaagtatctgggagtggctaaggccagcactatgccatgggaagcaaggtgggcctgaggaggaggcagcagcgtcagcctgcaacaagtgggggctgccctgcagagacctaagagtcatgttatagagcacagtgtctgtaaggccaagaagtgtggacagccaagtgtgtcaattactagacatactcaagaggagcaggaagggcagggcatggtggctcatgcctgtaatcccagctacttgggagactgaggaaggagaatcgcttgaacccgggaggtgaaaattgcaatgagccgagatttcgccactgcactccagcctgtgtgatgggagcgggactccatctcaaaacaaaaaaagaaaaaggaaaaagaaaaaaagaaaaacctaggtatacttctcaagcaaataaaaataatcaaaaccaatatcatgcccgggcacaaatttcatatatataacagatttaaatatatgagggtgattatcctctcatatctccatttttttttgtttttccatttttttctttactaaaaaaagttaatgccaatgacacacaatttttttttttttttttttttttgagatggagtctcacttcttcgccctggctggagtgcaatggcgtgatctcgactcactgcaaagtctgcctcctgggttcaagcaattctcctgcctcagcctcccaagtagctgggaccacaggagtgagccaccacacccagctaatttttgtatttttaatagagacggggtttcaccatattggccaggctggtctcaaactcctgatctcaaataatctgcccgcctcggcctcccaagattctgggattataggcgttgagccactgcgccccgcctatgtatgattttttttttaattttattttcataagtttttggggaacaggtggtattttgttacatgagtaatttctttagttgtgatttgtgagattttggttcacccatcaactgagaagtatacactgaacccaatttgtggtcttttatccctcacccccttcccaccctttcccccggagtccctgaagtccattgtatcattcttatgcctttgcatcttcatagcttagctcttgaacccttactttctgtttgagggagaagacatatcatctacaagtagatactgtgtaaacattccattgcatgactatcccataacttatttattatttgtgtttggttatttgctgctatgtaacaaccccactcccaactaaatggtgtgacaattccatgattctgtggatcaaaaattctgaaaagtcaaacccaaggagttttgtctctgctccatgatgctaaagcctccgcaggggtgaggcgaatggctcagggtgactgaaaagctcagggttggaacagctggggatgaggcctctatgtataagatgattcttcactcacaggtctgaaactatggtggggacagccagaaggctcggctcagctgggacagtcacctgagccctacacatgacctctccaacatggtgatcctgaagcagttgggtttcttacacagcatcacacttttcttttttttttttttttttgagatgaaatattgctctatcacccaggctggagtgcagtggcacgatctcagctcactgcagcctccgcctaccaggttcaagcgattctcctgctccagcctcccaagttgctgggattgcaggcgcctgccaccaagcccagctaatttttgtatttttagtagagacggggtttcaccttgttggccaggctagtcttgacctcttgacctcaggcgatccgcctgcctcggcctcccaaagtgctgggattacaggcatgagccaccgcgcccggccaaagctcacacttcttatgattcagccttagatgtcacatcagttcattttccccacacttattagtgttagaagtcacaagcccacccatactcaggggactggcacacagaccccactctcaatggaaggggtgggacaccaccattcctgctgatgggcatttgggtaacttcctgtttgaagctattaagattgggctgctgtggccgggcgcagtggctcacgcctctaatcccagcactttgggaggccgaggcgggcggatcacgaagtcaggagatcgagaccatcctggctaacacggtgaaaccccgtctttactaaaaataccaaaaaaaaaaaaaattagctgggcatggtagcgggcgcctgtagtcccagctactcgggaggctgaggcaggagaacggcgtgaacccgggaggcggagcttgcagtgagccgagattgtgccactgcactccagcctaggcgacagagcaagactccgtctccaaaaaaaaaaaaaaagattgggctgctgtgactattctagtaggtgtctttggtgagcgcctacacgtgtttctctttttctctttagtatatgcccaggaggggaactgctggctcccagataccgtatgttcagggtcacacacacttccacagggttttccaaagcccttgtaccagcacgcactcccagcacctgtgtgactgctccagctgtcccacagtctcatcagttctattgctgatattttcattttagcttaagttatatttaataggaaaattaccgttgcctctgccccccgttcctgcctgtaggagtttctcgtagctgttgctacaggtggccacaaatctgtcacttaaacccacacaaattgatgtccttatggctttggagtcagaagtgtcaactgaaggtactagcagggctgtactgacctggtggcctcagggagcatctgtgctgcttctccaccttctagaggctgctgcatccctcgctccagccccttcctgacaccactcaccctcctacttctgttatcacatcctcaccttctctgtgttcagggctccctctgtctctctcttgcaagcacacttgggattccattgagggccacccacataacccaggagaatttctccacctcaatatccttaacaactgcagagcccttttgccataaaagttaccattcacgggttccagggattgtgacatgggtagctttaggagtgattattcctgcctgtctcccgctcaccagaacttggactttctctctcaacaggagccccctgtgtgggaatagcctgtctcaacgacgccctctataaggacctgcttcctcaaaggacctcatagtcgggtcctgcccctcagtgtccagtctgccttggctggaggggctgcaggggtgtgttggcgccacctggtggagacagggcatcacagcaggtgggagcccagtagaagcacaaccaaaacatgggtaatgtttaaaattttctggctaagcgctgtggctcacgcctgtaattccagcactttgggaggccgaggtgggtggatcacatgaggacgggagtttgagaccagcctggccaacatggtgaaacatcccctctactaaaaaatacagaaaaattagctggacatgtggcgcgctcctgtaatcccagctactcgagaggctgagacacgagaatcgcttcaaccccggaggggttgccgagatcgcgccactgcactccaggctgggcgatagagcgagactctgtctcaaaaaaaaaaaaagaagaggggaggcgaggggaggggaggggaaaagggggaatttgtttggagctgagacatccatcttctcctgacctcagatatttgcactcctggttatgaagccttcacacttggactgaatacaccaccagctttcccgatttccagcgtgcaaatggcagatcgtgagacttctcagcttccataattacatgagccaatttatatatataaattgggtcctccagaaaaacagaataaattatatatataattatacgcataacttaattaaattatacgtataacttagctatatatataatttattctgtttttctgaagaaccctactgacacaaatgttgagcatcttttcatgtgcttattggcttaataacttgtacatcttctttggggaaatgtctattcaagttctttgcccattttgtaactgaactattaatatttgtctttacattgttgagttgtaaaagttccttatatattctagatactagagccttatcagatatatttctgcaactattttctcctaatatataggttgtgtttttattttctttttctttttttttttattgagacagtctcactctgtcacccaggctggagtgcagtggcatgatcttggctcactgcagactcgacctgccaggctcaagcaattctcccacttcagcctcctgagtagctgaggttataggcacttgccatcgcacccagctaatttttgtattttttagtagagccgaggtttcgccatgttgcctaggttggtcttgaactccctgcctcaaagcgatctgtcagcctcagtctccctaagtgctggaagtacaggtgtgagccacagtgcccggccatctattttcaatagtgttttttgatgtacacaggtttggaattttgataatgttcaattcatccatttttttttttttttttttggttctttctactggaccaccactcttgagccctctaatccaacctccacgcggcagccagagggagctctctaaatgtaattactctttccctgctccacctgctcaaaacagtgtcacatttgtgatttaaaacagtatttctcaaacctaatttgcaaacaaagcaggtggaactcttcttgtatgcacagcatctgatttggttggtctggcatgggtctgggagtgagcacacctaccaagcggctgctggggtaacttgcgttttccactgatgatttcagcaatgtttccggtcccacatgctcctccagaaccttgtactcccccatgaaaaggtggagtccatttccccttcctttatttatttttttgagacgaagtttcactcttgttgcccaggctggagcgcaatggcgtgatctcagctcaccgcaacctccgcctcctgggttcaagcaatgcttctacctcagcctcccgagtagctgggattacaggtatgtgccaccacgcccagctaattttgtatttttagtagagacggggtttctccatgtcggccaggctggtctcaaactcccgacctcaggtgatccgcccgcctcagcctcccaaagtgctgggattacaggcgggagccaccgcgcccggctatttccccttcctttgaacctgatcaggacttgacgatggcatcaacatggtgagagtgaccctgcatggcttatgaggctgggttacacaaggcgatgttgcttctgactggctccctctcaggatacatgcccttggaacccatcctctaagctccttgggagcccaacttagcccatgtggagacaagacagggagagaaacagaggcacccccagccctcagccagcatcaaccgccagacaggagagcaaatgcgccaacaatgattccagctgaagcctcagacagcgtggagcagagatgagggatccctgcagattgcagatgcgtgagcaaaatgcatgctgtcactgttttgaaacaacaatgtctgggggctgtttgttatgcagcaatagacagctgtaacaatgctgttactgctgtattccatgaatgactgcactttgagtagcagggggctagatcactagataagccccatggcttctgtgtatgctatttttctacttttatatccttttcattcactttttttttttttttttttgagacagagtctcactctgttgcccaggtgggagtgcagtggtgcaatcttggcggactgcaacctccacttcccgggttcaagcaattattgtgcctcagcctcctgagtagctgcgactatagatgcacccccatgcctggctagtttccgtatttttagtagagacggggttttgccatgttggccaggctgatctcagactcctgacctcaggtgatccacccaccttggcctcccaaagtgctgggattacaggcgtgaaccactgcacccagcctcattcactttctttacttggctcatttttccttgttgcctcaattctcctctaagatcactttcctgacatttcagcctgggcctgttgccttctctgggtcccctccgcctcctgtgcctcccccatctcagccttgatccctcagattatacttcctctgtccccaccctgaccatcttggctgtccctggatagggatgggtatcttctcccactggtctgggagatctggaaggacaggcctggaaaagacttggtcactgctggaaggagctcagttagtgtggtgctgaggacagtacgggtgaggctggccccttcacccaaactcccactctcttccatagatttcacctctgtggcccaggccataggattagggcaactccccttaaacatcgagtccatcctccaagctgtccttttttttttttttttttttttttttgagacagagtctcgctctgttgcccaggctggagtgcagtggcgcgatctcggctcactgcaagctccacctccagggttcactccattctcctgcctcagcctcccgagtagctgggactacaggagcctgccaccacacccggctaattttttgtatttttagttgagacggggtttcaccgtgttagtcaggatggtctcgatctcctgacctcgtgatccgcccgcctcggcctcccaaagtgctgggattacaggcgtgagccatcgcgcccggcctcatgctgttcttgaatagtgagcacctgttacaagtcgccccaccagcctctcacttgtacccccctcatctctttctccccaagagacagaggaccctggcacttgtgaagcatgacccagaccctggggccatggcatccaacatcctcattccccatgacccctactgtctagatgtagctgccaagagacccccagactccccgggcctctgtctagagtgccaagacagagagagaatgccctgccgcttgcatgctttgtggggtgtccttcccccttccctggctgctaggcgtgacttcaacgttctccccaacccccaaacagcagcactgacaccagctgcagacctggctcaggttagctaatgaggaccaggctggggatggagcctgaacccctaaaccccagtcctgtaccccaccctaatcctggggtctccactggacaaaacgaagcagcttggtttttcgttgttattgtttttgagatagagtatctctctgtctcccaggttggagtgcagtggcgtgatctcagctcactgcagcctccgcctcccgggttcaagtgattcttgtgccgcagcctccccagtagctgggattacaggcgcgtgccaccacacccagctaatttttgtatttttagtagagacagggtttcaccatgttggccaggctggtctgaaactcctgacctcaagtgatttcccagcctcggcctcccaaagtggaagcggcttatttttaaggagaaaactcccgtggaaaggaatcagcacctcctctgtcaacatttcacttctctgaaaagactctcacttccaacagaaagtgctttgtaacacaacaatgaggctgggcgaggtggctcatgcctgtaatcccagcactttgggaagctgaggcgagtggatcacgaggtcagaagttcgagaccagcctgaccaatatggtgaaaccccgtctctactaaaaatacaaaaattagttccgtgtggtggcgtgagcctgtaatcccagctactcaggaggctgaggcaggagaatggcttgaacccaggagatggaggttgcaatgagccgagatcacgccactgcactccagcctgggcaacagagtgagactccgtctcaaaaaaaaaaaaaaaagaatgagaacatatggacacagggaggggaacaatacacacaaacaaaatttagaaacaggtgaaaataattttagtaatatttttactaatactgatatgctcaaaatattattatttcaataagtaatctaaaaattattgagatgtcttatgttcttttcatcatactaagcctttaatatttggtgtgtattttacactcacagcacatctcaatttgcagtccccatgtttcaagcactaaataaccatgtgtgtccggtggctaccatactggacagcgttgatctgaaatcgcatctgtatgcatcaccagcatatttgcagagatccccatctcagcagcacacctgaggctcatctgcgaaagcacctgcaacttctctacaacctcccacatcacctccaaacacatcctcatgtcatctgcaaacacacccatagctcacaggccaatgcctaaatatcattgcaggcaccttcagagaaagcacttactaaaggggtatacttgattccacatctgctttgacctgcaaatctcccttctcctttacatacatttgcatctcatttgtatgtcaatctaaatccactggcagagcctcagatcatcatctcaaagtcaggtggatgtggggctgggcaggcctccaggtgttcctcctcctgcttcctctggggctcttgatcctcctcctcttccttgctgctctcctcctcctcctccaatatggtgaccagttcctcccgcagcgcccccatctccagccccaggctgcacagctgtcccagcagctggacatccactcggcgcaggttcccctgccagtaggaaggggacgtcacagggatgccaccccagagagcaaggggtctctccaggacctgggtgagagcaggtcccaactcatgtcctggccacagcgcctgggcagggtcctcactgtgcccatggaccctaactgccttcctgcttctcagagtgtctcttgatctctaactcttctctttgtctctccatttcattgtccctgacttctctctctctgtctcctccctctcttatctatatctgtccctgtttccctttgtctctgtccccatttattttttgtctttccatgcccctgtctctctgtctttatgtgttgccatttctctgcccctgcctttggctctctttctctcgcttgccctctctctgccctccccaactttctcaaattcagtctgtctctccatctctgttcctgctctccgtctctgcttcccacctctgtccctctcttttgggatctccctgtccccacctctgttcccgtccctcactctatgtctgtctctcggtgtctgtacatgcctctcatgtctctgcttctatctctcagattctgtttttcgatctctggccttctctatttttgttcatttccattcattctcatttcctctctttctctttcccttccaaacccctcactcaccagctcctccctgatccacagcagactatcgcaggcacctccagtgtctgcccctgcagtcctgagggtctgaccagggatttccactggggagacctccctcagggcctgggggggtgggcccagccccggaggcaccagtccagcctgattcagctgcctccacagttccatcgtctctgagctatggctgcaaggagcaggaagtagcaaggtccagggtggcctggtcccctggggagctgtgtgcgtggtggagagtaaagggcagagggagtgggatgggggttcctgggaaaggtatcccaaagtccactcttcagagagaatcagctggccttgtgcttttctttttccttctgaagtctaacctcaactctgctcacagggttcaaacatagcctcttgcagaggtctaactccacccttccctgcctgtctcaggcctgacccctcaggggcgctcagtgtctgtagatgcctggcaccctctgtccttccacctgccccccaccaccacttctccagcctctcctcagcctccatttgacctctggcttgcccatagcttggtccttgcttgtcctcttggcacgggtcatcctagggctttcccaccagtgtgcctttgggggcaggaatggctcccaggggcaccaagacagcaatcccttagctggagtgcctgtgtccaggctgctggcctagggccaagcagccaattctgctgaccctggacttgcctatgggtatattatccctgttgagggtgagggcttctgctgtggaaaagtctgggaagcactgcaggcctctctcggccttggacccttccttcagacccaaggtgcatatatatacatatatataatggtagatcacgaggtcaggagatcaagaccatcctggccacatggtgaaaccccgtctctagtaaaacacaaaaaattagccgggcatgctgccgcgtgcctgtagtcccagctactcgggaggctgaggcaggagaatggtgtgaacccaggaggtggaggttgcagtaagccaagatcacgccactgcattccagcctggcgacagagcaagactccatcttaaaataaacaaatgaacaatatatatatatatgtattttgttttttgagacagagtctcgctctgtcatccaggctggactgcagtggtgcaatcttggctcactgcaacctccgcctcccgggttcaagcgattcccctgcctcagcctcctgaacagctggggttacaggtgcacgccaccacacctggcgaatttttgtatgtttagtggagacggggtttcaccatgttagccaggctggtctcaaacccctgacctcaggtgatctgcccacctcggcctcccaaagtgctgggattacaggcgtgagccaacgcgcccagccccaagtcccttttaccatagaaagtaacatagtcacagtgcccagggattcacaggtatggggagagggttcgttattcagctgccacacccaccttcctaaacctgctgcccttccagtttcctcacgtgcacagccacgcccgtctgcttttagtttctcaatctgttggcttaaccttcaaaacaggcccaggatttgagcacttctcaccattccctctgccccatccccattcatctcttgcctagactgctacagcagcctcttttactggtcccctgcatccacccttgccctctaaggcaagggtccccagtccctgggccaaggaccagtaccagcccctcgcctgctaggaactgggccgcacagcaagagatgagcagcgggtaagtgagcattaccgcctgagctccgcctcctgtcacatcagcagtggcattagattctcataggaggcaaaccctattgtgaactgtgcgtgcgggggatctaggttgcctgctccttatgagaatctaatgcctgatgatctcaggtggaacagtttcatcccaaaaccatccccaccccacccccgacccccagtctatggaaaaattgtcctccacgaaaccagtccctggtaacaaaacggttagggaccgctgctctaaggtacattctccacctggcagaaataatctttacaaaatgtaaatccgattttgacactcccttcttcccactgtgaatagaataaaaccctaccaggcctgcaccgtcagcccctgcccacctctcaacccagtctcctatctctgtctgcaagctggttcccacctcaaggcctctctgctctagaggctacctctccctgcagcgcttttcccctagatctttgaatggctctttccttatcattcacttctacttcaatgtcacctcttcagagaggcctttgctgatggccctacacccagtcacttttttttatctgcttctcatcaaaattgccttgctgattcctttgtttcttattcatcctctcccacatccatcctctcccagcccagaatgttgacttcctgagagagggactgggtctgtcctgctcaccatggtaacctcggcatctagaacagtgcctgccatcacgtggtaggtgctcagtaaatattcttggaactaatgaatgaataattctatccacaagacttcacaatggctcttcatgctgcgatctagctttcaactccaaactggtcttgagatctcacctcagtctctaaccttgacatctaacctcttcacccactctcttacctgaccctaatttttaaaaatgacgtggtcagcttttcagccccctcattccctgtttttaggaggtagtgagtggaagctggaagaataagaaagcttggggagactgcaattgcagtcaggaaagaaaggtactctgccgggaagaacaccccatcttctcctagggaaagattgtggagtcctggggtttgttttgtttttcaattttttgttttaagagacagcgtctcgctctgtcacccaggctggagtgcagtggcgcaatcacagctcactgcaacttcgacctccccggctcaagtgatccccccgcctcagcctcgtgagtagctgggaccacaggcgtgcaccaccacgcccggctaacattttattttttgtggatataaggttgccctatttctttgtggagataaaggctcccctatgttgcccaggctggtctcgaactcctggcttcaagcgatgctttcgcctcggcctccacaaagtgctgggttcacaggtgcgtgagcccgacctgtgtctcgttttgaagctcagggagagggcgctgtgagcaatccctaaaccctttaagagtaaaaagtgcgtgcacctttaagaggacggttagaaaacgcggggcgtggccacaggagaataagttcgcgctgaaccaggagcgtgggataagaccggccccttccggttacgaaaccttagcaagatggcggctccctgggcgtccctgcgcctggtcgcccccatgtggaatgggcgtatcaggggcatccatcgcctgggtgcggcagtggccccagagggcaatcagaagaagaaaaggacaatactccagttcctgaccaactatttctacgatgtggaggctctgagggattacttgctccaaagggagatgtacaaggtgcatgagaaaaatcggtttcgagacaaggagtggatcaggccagataagtatggccatttctctcaggagttctggaatttctgtgaagtgcctgtcgaagctgtggatgccggtgactgtgacatcaactacgagggcctggataacctccgaacctccgcaggctggacatctcggacctccctgccgtgtccaaccctggcctcactcagatattggtggaggagatgctgcccaattgcgaggttgtgggagtcgactgggctgagggcctgaagtcagggccggaggagcagcctcgggacacagccagccctgtccctgcctagcctttagccctgtccccactcacgtggcttctcagcgggctgcatggaatgtctggtagctcaccacacttctggcttccatttgtcttcactcaacgtcagggtgggggagtggtgctggccaatcacaggagagagcgtgagttcccagtatttattcctggctgcccttggctaaaggtcacagctcctgtcaccctgtcaggcagccctttccatgcccctgttcaggcctggggaggtaaaggctcaggctgttagtagccgcagagagccacactcaccttgtcaggagactcttctcaaactgtccttatgtgagtgcactgccatttcttgcagggaccctgactgacacaggggctactactgacactttacagggatggttctcccccgtgcagggccgctgtgcccactgcaggacatgcagcatccttcgccccactccactcactaaaggccagcgcaccccaggccccatagtattgctggttatggatttattgactttatgttccaaattcagctttttcagttggctgttttttgaaaggggataagctttgtcagtagagggcaccgaacaggcattataggaggaaaggcgcctccttcgtggttcttgttggcctccactgaggcacctctctgggaataacgttccccagcaccccaaatggatttccagtcaattcagaagcattttaccagtgaagccctcattattccagttcactgttaaagccagtaattctctatattaaactttccctgttcggtttatactccggagtataaaccgaacaggggtggccaagctgctgtgggccgccgccgtgcagaaccgctggaactcacgcttggggcgacggctacagttggattttgcccctgcaggcaggttcggtgtcgatactggcgttgatagcgctgctgccgtttgacgtggcgaatatgggcttgtttctcggcctgatcgccgtgttgtcgtagttcgcagccacccagga

SEQ ID NO: 735337 - DNA, 188134 bp, Homo sapiens
ctccaaggctgagggatgaggagacctgctgaggacccagggccttatctttccatcccactccataggtcccagtattgactgatgctgtcttcacctcctagcctcacttttaaccttctggcacccgcccaccactgtccagttcactattgaagccctgccgtccagtgctgcagagggaaaggatgttcttctactggcctgcaatatttcagaaactattcaagcctattattggcacaaggggaaaacggcagaagggagccctctcattgctggttatataacagacattcaagcaaatatcccaggggccgcatacagtggtcgagagacagtataccccaatggatccctgctgttccaaaacatcaccctggaggacgcaggatcctacaccctacgaaccataaatgccagttacgactctgaccaagcaactggccagctccacgtacaccgtgagtgattcccccatacctctgggtgctggcggtcagttctgcttcacacacatgagattgtcaggcctgggctgtgcctgcatccccctctgcattttgtcccgtgttgagatttgggcatttagtgcaggacacacacatggtaggtaaacttcaacagatcagaattcctttcctgcatccaggccctgcagacactgatggcgggggcgggggggcctcagcagggggaggtcagtctcagccaagcaccccatgccctccccatgaacctgaccctgagaaagaccctggagaactgggtcagggcctggcctgagggcgtcctgggaacctcacaaaagcccagcctcaggactcctgactccgtgtgaccccgggaagcctgtgtcagggctggggtgtggtctcctgggcagggcttactgggagcaaggatttaccagatgtctgcgggctgtggttcctgaagcttctcatcagtgagggctcagctcccagagtctcatctagacaaggacagagcctaccactttccctgggactcagcctggagagggcagggggacaggattactagggcattggccccctgaatgaggagcttaagagatgcccttgggcagtcagtggcccaggggtaggaacagaggggagaaaatgttcctggcagcttcttgtccaccggggatcatgcccaggggtgctctcccatggaggcaaataacagatgctgttgatgtgaacacctcctctgtgccaagcttcatgtcagatcctgtgaataatttaaagttcattcacagacaaagtggcaagcctcagaccattttccatttacatattgtatggaggggaaactgaggcacagagagatacagacaccggccacggtgggcagatcgcagctggcagagtcacatgagggctgtctgcagctgctgccacgtcctctccttcatccctggtgccttactaggtgtctgtggaccttagaacagccactggttcggatgttttcttcttaggtgtctacagctcggagggggagattctggtctggagagttatgagtaaatacagaattaatcagttttttcttaactaaatcacctgcctcaacaatcagtcagtgctggggaagttcaggcctcctcgctcaggtccacaccccgcatctctggacatgaaatggcttcgtgtgttttctgatgtgtgggtatcattccaacaggaggataaaggggaggactttgctttctctccccattcacaccctgcaccagccagggcccagtgtgagacacatactccgtagttctctcatgaaggagggagggaatgaatgaaggaatgatctataacctcttcagagacagagacctggatacaagatcctaggaggttctgggcccaacgtgagacacacactctgtagttctcttatgaaggagggagggattgaatgtaggaatgatctataacctcttcagagacagagatgtggatacaagatcctaggaggttctggccacacctgttttctgtccctctagagcctaagacccatgtctcattcatctggcccgtttctcctaaatctgcccctgggagctgagtctcatctgaccctggggctgcagggctgtgggaaggttttcaggggagggatcaggcttgcgggtagtcccacacgtttgccttacaccctggagctctacctggttctcactatgaatatcccataataatcccccctatcctttctggggagtagaaaaaaagtaaatatttaaaaatatgccagagcatctgttcttcttagcaagttcagatagttattagttagcaggaataaatcgttattttaccagagcctcacctgctgggggtttatgggagcctaactgactgaggggggtgggaaatatccaactccagccccctctagccatcatgtcccacctaaaggagagaaaaaactgagaggcacttgtgacattcacagcccagggcacagactctatccaggaccacagaacccctccctccccccactcaccaccgcatcactgaacgcctgctcacccaagttcctgttgcccagtacatcatgtcctggctttcaacaaaaactacaagacagactagaggcaaaaaaaaaaaaaaaaaaaatgcagttcgaaagacagaacaagcatcagaaccagatgcagatgtggcagggatgtggcagggatgttgaaattatcagaccaggaatttaaaacaactctggggccaggagcggtggctcatgcctgtaatcccagcatttgggaggccgaggcaggcagatcacctgaggtcaggagttcgataccagcctggccaacatggcaaaaccccgtctctactaaaaatacaaaaaattaggcaggcatggtggtgggtgcctgtaatcctagatactcggaaggctgaggcaggagaattgcttgaacctgtgaagcggaggttgcggtgagcctagattgtgccactgcactccagcctgggcaacagagcgagattccatctctaaaacaaacaaacaaaaaacaatactggctaatatgctaaaggctgcaatggaaagcatagacaatgtgcagaacagacggatgctgtgagcagagagatggacaggctaagaaagaataacaacagctactatatctatctatctatctatctatctatctatctatctatctatctatctatatatatgtatatatatgctagagatcaaactcactgtaacacctggatctcagagtggttgtgaggatgtttattaggagattaaagagattaaagcagagttatacacagggcgagagctcaactgatgctatcaactagtattcttatttttttgatgttgttattggcaataaaatcaggaacaatgcagtaaaaatttggttttatcatgtacgagttctgtgaccttccttgacttactgaggtactgtaagtctcagattctaactctgcagatggcggtgatgcccctctccctcaaggtgatgtgaggatgagatgagctgtaggtaggttggtgcccactgtgcctggcacatggaaggcccctgaaaatagtcaatgaacatcatccccgctcatcagcatggagttgacagtgagggctcgctctctgtgacaatcatggaatggaaaagaagaaacaagaggaagactgggcgcagtggctcatgcctgtaatcccagcactttgggaggccgaggcgggcagatcatctgaggtcaggagttcaagaccagcctggacaacatggcgaaatttcatctctactaaaaatataaaaattagcctggcatggtggcacaaacctgtaatcccagctacttgggaggctgaggcaagagaatcgcttgaacttgggagatggaggttgcagtgagccgagattgcgtcagtgcactccagtctgggtgacagagcaagactccatccaaaaaaaaaagaaaaagaaaaaagcaacagagggaagaggtgtgacatgagaggaagaagggatttaaaggtacaggagcagggcgaggtgcaagcacctgtgggagaatgtaggagttggtacatcccagtgtgtcaagtctgagacacagaaaatggtgcaaccgtggagagcaagggagtcagctatgaggacagcccaacagaccacactcaggctctggagcatttccttcctccctgactatgcccctgccctgcaatgccccttatggtttcccttggaacaaacttgggccttgtcccctttgccttcccctttctgcagaaaacaacgtcccaggccttcctgtgggggccgtcgctggcatcgtgactggggtcctggttggggtggctctggtggccgccctggtgtgttttctgcttctctccaggactggaaggtaccgcagcttttccccagcctcctcccacccctaggctgaccccagtcagggaggagggagaccccgccctgtattcagggccaggctttccgcatcctcccaaggaatccttccctctcattccatggctcctcccttgccagctgctgatcctaggctgcctcttcctttatgaatgtggcacagttaaggttgcacccctgagtgctgtcctagttccctaacacagcaaagccacagctgcctggagggaggaagggagggagggagggagggagataagacgggagtgctcagaacctggtaccttctgctgttcattgaatttacccacccagtgaggagggatttgcaggcttgagatccatggtgggggtcctgggcatggtcacgcagtggggagtggcaaagcctggacaggctgggtagggtcagcaccccatcgtgattgatgtccctgaggtgtgagatgggagaacctggacctcaggacctgctgtcctttatgtctcttgccaaggggtggagagagagaggacaaggccattgccccatttcagcatctccaggcctgaaaggagggtctggccatggcagggatactgagttctgggagaatatgatacatgctccttgcctccccatgcccccagctcccccagtgtcctgcacacacagccggccctgctttccctctggggccttgacccttcctctcaggcaaacgcaggtggtctgattccctccctgagtcctcagtccctttcctgggtccctgggtcaatgttctcctcacccggcatctgcctgggggggtccttcctctctggccaggacagacgtgactgcttaaggcctatcctcagctccccgtcctcggccgctcctaccacgaaactgatggagacaggaggccttcactccagtccttgaaaatggagtcccttccttgtcctttattctgcccctaaacctgtgatttctccctgcaccctcatgaataatcctgacctttcctagggccagcatccagcgtgacctcagggagcagccgcccccagcctccacccctggtgagtgtcccttcagcccaggtgtgggagcccctaggcctgccctacggtgtccactcctgccagtcaccccctgggggcctctgaccctttctttggggctgcaaggaggatgtcaggaaacatgacacaggggaccccgactgtcttgttcagactgatctgtgggctctgggtcgtgggtcacctcctcgacctcagctgctcaggtctcccctgggaagaggctccctctccctgattctctgggagctgaggacccctacactctcctgcaggaggggcccaggctctcctcccaccctgctgctcactcctgtctctgtccccaggccatggtccctctcacagatccaccttctcggtaagcctgttccctccccagcccttttctactggggtcccaacagtgcaggctcagggcagggggaccatcaaccccacagcacagcactgacccacctttccccagaacagtcaggtcaaagtgagtgcctccagccaggatccgggcctctctacagggccaggaccacccacgccatgtgctgacccctccccgggaccctctacacctgaggagaaccctggagtccagcaggtgcagaatggacactgggaccatcagtcagaggcccacattaacaagggtgcggggtgggcccagccaggacaggggtcagggtgttgtgtccacactgggaggctgagctcaggggcagagctggtcaatcctgaggggaaatgagtggaagtggaggcagggaagtaagtcctggccgatcagagacaggaaccttccaggctgggcttccgtgaccctccctccctgtcccctgacatctcctctctcccctgcccaggcccctctacccagccccagaacagccactcccatctatgaggtgagtgtgggccatggatgttctggtcccgcaggctccaggggacccaggatctgcccccaccagcacctggctgagctcagattcaggaaaatgcagtgaaaatgagaacaggtggtggtgagcagaggagggaggggcctgggaacagggaccccctgagcacagccaggttcagccccagagaagccctgggtgggcccagagcctgggagatgccagacactgttctgagaaggctacaggggttgaggcctcttctctgtttttacaggaattgctatactctgatgcaaacatttactgccagatcgaccacaaagcagatgtggtctcttaggttcctctgggagctgctcttgtgggttgatggagcgtccccaaagctcccagccctggggacggggaaggacatggagcctgagccagagaaccagctctgagtcctgaggagacacaggcctggggacagggagggatgggagtccctgctgaatatctggagaccctgacaggttgccctgggctctgggtgggccgggacaaaggcctctcatcaccacaggaagcgggggcttgcaaggaaagtgaatgggcctgtggcccacccggggtcaccaggaaaggatctgaataaagaggacccttcctctcattggctctttttctgctcacgggaacttagcagaaactcacctgaaactccgtgtccattctctcccgggtcacacagggaaaatatctccaccttgtctcaaccacagtctctcttccctgggaggcagaaataggggttgggagtcaggctggggtgggccctacacaggaaagggcaagattcacatgagccctgcccagccagccgagcgctcagctgtcctcacactaccccagggaccaaggccatgcacagccccagcctgggtccctctgtgaatgcatgtggggtctcaggagcacagaagatggggccatctgatgtccacaaaaggtgagcaatgcgggagcaaccatgggtggtataggttgcggctgtggcccctacgcagcctccagtgtcctgacccctgctgccctcttcacccaggccctggaggcccagtctatcactgtcctccacaaatgaacttacctgtccccaaatccaggatcctgtgtgcttatacctggccactaggttctcctctgtcccagtggctactgctcaggacatctttatccctggtggggcacagagaggggctgtcagagcaaccaagattaatacagacgcataattcagtccttgagcactacccaggactctggcccctcattgctcatcagttcccactttaccccctggcatggatctcactgagcaagccaactctttacacaggagcatccaggtcagaggtgcaggactcccccatctaaagctcatgcaggctcccatggcgatgggacaacctgtctgctcctctccctggcccacagccctatctcgcctgcagctcctccacacacctgggacagcagttctcagcccttccctgagggcccctggaagggtgatgatctcatataggttcacttgaaccaggtgccaccttcccacaagtgagctggtgcctgcactaaagcacagagccacagttcccaagagtgttctgccactgccacaggtcccaagagtgttctgccactgccacaggttgttcgtcctgagatgagaggtaagaaaacaacccgcaatgggttgttttatatcgggatttgcatcaggatttagctctaaatgacccctgatcccacctgcacacagcgtcagatgagacaaggtgaggcctctttagttttctgttgaggctgtgacaaattaccacaagcttagtgacatagaaacctgaaccaaagtgcccacatggctgtgttctttctagaggctccagggaagagtgcatttcctctccttttccacctcctagaggcctcctgcaaccttggctgtgtcctctttctccatcttcaaagccagcagcacagcatcttgaaactattctgtgccctgcttccatccccacatctccacctcctcccacctccctctctcacttaaaaggaaggagccttgtggttattttggacgcacctgggataaaccacaacaacctccccatctcatgatccttcctttaatctgtaaagtgtcctttaccacgtgacatgtccacagatctggggatgaggatgtacacatctttgagaggcccttgttctgtccatcactcctctcaaggccatcttctcatcatcgttcactacaaactacacatgggcacctggatgggttcatcatgactgtggcgtcagttcctgcattaacatccccagcaccctccagatcctgagagagggagacggagggctctccatgcccctagtacctctccaccttcttcttggtgacatgcttagttgctaagaataacagaaagcggaggtgactgaaagatcacaactcaccggcccttcaatagttcgtggacatcagcaccacggacagtgactcagtgaggctaatttccaggtggcagcagggagcatgcagataggagggaactgcaggaaaagctgcccattctattctatatgagaaagagtgtaagaaagaggaagctattacagggataatgctattcttctctaatccataaattgcgaaacctttgcatgtctggatatcatggtttttagcacatctgctgccactccctgcagggctgattgctgcatccaggatgtggtctcttggggggctcacagcctgctttggcctcatggtgagtctccctgcccctgacactcaggccactgtctctgcctacaacatggtgggaaccttccatgattaacgtctgattctctgtgcctgacctttgaagcacatccatcactcagcctggagcatccgctgagctcagcatcctgctcctccatccccagctgagcccttgaggagatgcttgagaggatctcctgggctcctctgtgagctcctccaggctgagccttgtgcttggtgtcagaggcctttgccatctgcttgttctttccataggcaaataatcctcctcagggacaagtggggcctgaagatctgtctgaatatctatctatctatctatctatctatctatctatctatctatctatcatctatctatatgtatgtatatatgagaatgctttattaggcaaaactgcatactatgaacatgctttaaaatgcaacaggatgagatgtgaagacataaagaacaagtgtgtagtgacacatggctatcagaacacactgaagaatccacaccgcggccgagagcagtggctcacgcctgtagtcccagcacttttggaggctgaggcaggcagatcacttgaggacaggtgttcgagaccagcctgaccaacatggtgaaaccccatctctactaaaaatacaaaaaatttagccgggcctggtggctcatgcctgtagtcctggctgttcgggaggctgaggcaggagaattgcctgaacctgggagacacaagttgcagtgagctgagatcgcaccactgcactccagcctgggagatagagtgaggctccatctaaaaacaaaacaaaacaaaaagaatccacactgcttccccgcttcactttacccagaaaaggaatgttctaggccacttcctcttcagcacacatccccagggaactaaaataggttcacagtcacccccatcttcctcattcccatcacctcttacccacagaggcatctctggtcctacagatccagccctgccttcaagaggcacaggtccaacccatccagtgtccctgctagtcacacacagcactcagggtacaatggagggcttctgtgctttggatgggaacaaaccccacctcacattcccacacctgagaagccaccagggtcctctctgtcctgtcctcacactcaatgtctgtcctgggtcacccttgtcatctctcctggaaataggcatggctcctgacaggtaggattgaggctttgtcttttcaggagtccctcccactctgagcacatgaaactgctcagctccatgcaaccctctctcaccaggggccttgttctctgggtccctgaatacctgggtccatgccatgtacattttaagaaaaatgacagtgactctcaccctgacatcctcacccaaggcacgtgtctgacaagaatcaccaggtgagatacctgtggctccacacacctgaggcttcactgcgcaggggtgtcctcatccctctcctcccacccctagggacagtaagcaccacaggctgccttggaccaccagctccccctcccagacacagcctcagatctatactgacatgctacatggagaggctctgatgaacagcaggtattaggaaatcccaccgaaccaggtgccacttgcggccccactcctcctcatatctgtgactgggacagacacacataacacacctctgttcaccgcccagcccccaaggtcaatcacagtctgcttctcccctagatccactgctccccatgtcttccgtcctcagctgcatcctgggtggcctccttgctgttcttgtaccccagaggcaggttccaacctttgtgatgttgcctgcaatgcccaaactttcccttccccttccccttcccttttcccctcccccttcccctccccttcccctccccacccctatcccttcgtcttcccttgtcttcccttcccttccctataaagccaaacatacccatccacctaccttgtggtcaaagtcatcagcctcctgctccactcagtgttctctgaccctgcatatggaggtggtggcccctcctagaacacccaccactcactgtcagccttgcgtggtaatcacagattttgcaggggttacctgtgttcaggtgtgtcacctgtggaaccagaactcttggaaggactggcagagggagctgcttaggatatctcagggctcctggcatctggtctaccacagggctattaacaacagcacttagggacaaggtggaggatggacggttaagagggtaaatatggatgatgtgtgggcaaagaataggacacaggaacacatgcagtactcaaataattatgccaagaaaggtgaggacatggagatggacattcccatatacttctgatgggactgcagtttagtccctacagcaacattgacctcatcatgtttaacgcgcacacgctctgaccactatcctacttctgaaggcctccctgtgctgtgagctctgagaaggccaagcttgcctgttctgtctctgctaaagccagagaccagccaatagcccagcacagggtacttcataaatacatgttgaaggaatgagctccaggaacagtactccacatggtagagatgtgtgtatgaggatgttcactgcagaaggtcatgtcaatgtgacaagtgacgagcagcctcaaatccagcaacaggggtgtgggtaaaagatcatagtgtagccatgcaatggaaccaatgaaaaaaccacaattagagcaaatccacatgtattaataaaggaggtgccctccatacatgctgcacctaacagaatgttgccaaataagaatgaaaaatgatgatatttgggctgtaaaaactagaagtcagctaaataagaatgcatcgaaagtatttgtgaatgcttacaattttataatgccttggcatccgttttggatggaagttggactttctcataccagaagcagggctcagtcacctttgaaatagtttccagttctccacctccttccagttcctcagtgtgattgatcagatatctgatttatacaactgcctcctggtgacctcctccctatgggacttccggatacagcccgtatgactgccccactgaccccacaccctgcctgctgcagtgaccacctctaattacctggatctcatgtctgcttgcattaaatccaccaattaaaactccctgaggacaatctgtttgaataatattctgtaccctaataaaggccttgacccatgggttccccctctgtcctccccatactgcccctgacctctgtgtgtgtgtgtgggtgtgggtgtatgtgtgtgtgtgtgtgtgtgtcctccagacagggcctgtatcccccaggacctgtaagtaataaatctttattttcatcttatgtctctcgcaatcattggcaagagctctgcatcttaaagatcgcaaatttaagaaattggtgtagtcggcacaatagagtacctcttctgtttagcacaagatatctcggagctgctgaggcttttaacatcctcgccggtgtggctgcctcactggtgaggccgttctgttcagtgcaattcagttgctccactgtgtgctgctgtgttgctgctgtagagtgctgccatgttgttctccccaaattgttaccgagtaggaacctgtaatgtgctcccaaggtggtctaccccatgagaagggggattctccatctagggcaagggctaggtgtgtttctggaatcctaatagggaaggcatccacagagggtgaactccactcctccttagagtgaggagtgacatttcccatttattttccccatggaggtgccatgtattgactttttctttcactgtcccaaggttgagccaaggtgagctatggagaccagggcaagataccatttctgttagcaaagcaaatgggtgacaacgtgtggagaagctgtggttctcctgatggatatagcagagtgccatttagtaaaatcttgtcaggaggctgcccctggttagaccggcagtgtctgtagtcactaaggtggatgcgaattttaggccctgggccatggataatccctgcagacacagccgtggcttcatgtgatggggcaatcccgggctagtggctcccttgtttctgcatttcttgctgtggttgcacaatcaacacctcaggggttgattgggtcaccttggaaagagaaacagctgcctaggaggctggtgcacatggaggccaccctcaattttattctgctaacaagttgtaagattaaaacaacagggggctttgggtaccatcaggaacttgtcaagtaaacatccaaagacagaaagaagaaaaagaaaaagacattaaccgtctagaaatacaagccattttaaagattttgcttaaaagatgcgcttgggctgggagcggtggctcacacctgtaatcccagcactttgggaggccaaggtgggtggatcgactgaggtcaggagttcaagaccagcctgaccaacatggtgaaacctcgcctctactaaaaatacaaaaaattagcagggcatggtggcaggtgcctgtaatcccagctacttgggtggagaatcgcttgaacccgggaggcagagacggcagtgagccaagatcgcaccactgtactccagtctgggcgacagagtgagacttcatctcaaaaaaaaaaaaaaaaaaaaaaaaaagacgggcttgtttcgtcgttgtggagtcatcccagagagaggctactccctagagtcactgaccacctttcctcctccatcttttcctcttatcattctagagacagaaaacaagaatctcagctttaggtggctaacctcaccccccaagaaaagaaactaccactttgattgactacaaatccaagaaaaataaaagagaaactttaaaaagtactgagcaaaccacaggtctagcaaacataatgctagccctaggttacttattcatttacaacaaacccctagatataggaggaaaaaataaaaggtaattaaatatatacacatacaatattttaatataaatatataataaatagttaaattatgtatgtataatatgtaactaaatcaaagtaaaatttcatactttgattctattggaaattcaaaattcatttattaacttatatattaaggaatttatgtaaaaaaagatttttaaaagggcaccaatttgcttttgtgtctctacaacataggatctaatttaactttacatttgctaaatacactaattgacaaatattcatggatttaatcaatactggggctcaaattgtagccacacgtgggaatcccataaatttaaacactctgtccctattatcttgagaagaaaactaaatataaaattgaaaaaaacaggtatgtctcaatttacctgtaactttgcctaaatttcccggagtcatatacccattgctgtaaaacattctctattggacataggtgctctgagacaataaataaaatagaagtgtttttggtacttagacattggcttgacaaaatgggatcccatgaaacctcagttaagatagtgaatacggcccaatgtgagttgaaatggggcctttaaggattaaaacttattacatgaaacctagtaagtaatggggtgattatccatactgcttctccatttcatagcccaattttgacagttgtcaaatctggaaaaaacaaacaaacaaacaaaaaaacccctgggaatctgttgcctcacagagacacaaagtagacatcaaaattgtatatctcagttccagttccaaaatggtggcatagaagcaagctggctttactccttcacacagaaaaccaaaaacaaatatacagcaccaaaattattaccagatatattccagaactcaaatatgaaaatgaaacagttttcagagccacagagaagtgaaaaaaactcccgacagatgacaaaagaatcagatttccccatctgtaatgtccctccctgccccattctgcctggtaccaggtgtgtggaaaattttaccccaactcatggtttctacactgggaaatgtaagatcaatgcgggcaaccagtttctgcacaatcctgggttccctgtccctgccttaacccacaagaagcattgtgagtgcccgaagggagaaatttccctgaggacagtcaaagagtggggaggcaggactaccatctccttccctggaaactctgctgtgtaactcagccaagggagacatgaaatcagactggtgtttcagcagctccatgttgtagtaggtttgtttcacaggtatcctgggcatggacatctagccagctttcccacactgccaggatatcccctttgggacctccctcagttaggaagggcacactctgatcatttactagggccaaggtaaaccctaaaggtaacttagagatgaaaaggaggtagtgacctagcagtaaagaactctaagaaaatctatccaataaaaatcaaaacaagccagacaaagactaaaataaataatgaatccttcaatgtaaagacctggacttacatccacaagaaacagtaagcaggtaaccatgatctccccacatggacaaagtgaggaacaagtgactgatcctgatgagatggtgatgtgtgagctctctaatcaagaattcaaaactgcagttttaaggaaactcaatgatcttcaagaaaacatggaaaagcagttcagaaatttatcagagaaatttaacgaagggattgaaataatttaaagaaaacaaacaggaatcttggaattgagaaatatatttgctgaacaggaaaatttattagagtctctcaacagcagaatggatcagaggaaagaatcaacccaaataagactcccccaaggcataaaataatcgaattctcaaaagtcaagggcaaagagaagattttaaaacagaaagagaaaagaagcaaatggcataaagaagctccaattctgtggcaacagattttcagtggaaatcatacagaccaggagggagtgacatgacattctcaaaatgctgaaaaaatattgacatttgagaatactttatccagtgaagttatccttcaatataaaggagagagaaagtttcctagacaaacaaaagctgagataattcacaccatcagactagtcttcctgtaaatactaaagggtaaatactaaatacttcaatgtgaaagtaaaaaaaaaaacactaacatgcaaaacaaccacaacaacaataacaacatttgaaggtataaaatccactggtgaaattaagtacgtagacaaacccagaatactcaaatagtaattgtggaaagtaatccaatcataactctagcatgagtctcaaaatataaatctatcaaaaacaataatacattttaggaggccaaggttggcagattccttgaggtcaagagttcaagaccagcctggtcaaaatggtgaaaccccatctctaccaaaaaatacaaaaatttgcagggtatggtagcacatgcctgtcgtttcagctatttgggaggctgaggcaggagaattgcttgaacccaggaggtggaggttgcagtgagctgagattgcactactgcactccagcctgggtgacagagggagactctgtcttaaaaaaaaatagctacctgtttggagaaaggtaatataaaatatgtaaatagagacaaagtcaaaatttgcaaaggatgaaattaaagagtagagtttttttggggggttttctgtttctattattttatttgtgatctaagataagttgttaccttttcttctcttgaagatactttgttatatctatgtttttggaagtcttatggtaactgcaacgcaaaaaatctatgatagatccactgaaaataaaaaacaatgacttaaaacatactaccagagacaatcaaccacaaggaagacagtaaaaaatgaagaaaggaagaggggagttacaaaacaaccagaaaacaggcaacaaagtggcagtagtaagttcttacttaaaaatattgaacactgaatataaatggactctattctccaattaaaaggcatagagtggctgaatgctgcctatatgctgcctacaagaaaccacttcatgtaaaaagatacaaatagactgaaagtgaagggggtggaaaaagatatttcatgcaagtggaaaccaaaagagagcaggagtagctatactgatatgagataaactacaaatcaaagactataaaaagagacaaagaaagtcactatgtaatgataaagcgctcagttcagcaagaggagatgccaattataaatatctatgcatccaacacttgagctcccaagtctcccaagtatttaaagcaaacaatagtggatctaaaaggagagatagactgaatacaatattaattaggggactttaacaccctgctctcagcaatggccagatctttcagacagaaaatcaacaaggaaacttcaaagttaaactacacactagatcaaataggcctaactggcatttacgggacatttcactaactatctaactgttacagaattcacattattttcatcagcacatagaacattcttcagaacagaccacatcttaagtcccaaaaccagtcagaataaattcaaaaaagtttatatcacatcaagcatttgttctgaccacaatggaataaaactacaataaatgaataactttctggacacatacaacctaccaagatggaagcatgaaaaggcagaaaaacccaacaaaccaacatgaaactgtaacaaaaggaaaacccaggaccgaatgacttcactgctgaattctaccaaacatttaataagaactaaaaccaattctactcaaaatgctttaaaaaattgaagaggatggaacactttcaaactcattctacaaggtcagcattatcctgataccaaaaccagacaaggacaggacaaaaacaaacaaacaaacaaacaaacaaacaaacaaaaaaacactacaggattgcttgaggccaggagtttgagatcagcctgggcaacatagtcagaaccaatctcttaaaaaaaaaaaaaaagaaaaaaattagccaggcatggtggcatgtgcctttagtcctagctactcgggaggctgaggtgagaggaccaattgagcccaggaggttgaggccgcagtgagccatgtttgtgtcactgtactccagcctggggaacagagcaagatgctctctcaaaaacaaaaagcaagctgggtgtggtggctcctgcctgtaatcacagcactttggaaggctgaggtgggagaactgcttaagcccaggagttcaagaccagtctggacaacatagggggactccatctctcaaaaacaaccaaccaaaacaaagccaaaaaagaacataggccaacatcactaacaaacatagatgtaaaagtcctcaataaaatattaacaaaccatgtttagaaacacatcaaaagagatcattcactatgattaagtgagattcatcccagggatgccagtatggctcaacatatgcaaatcaataaatgtgatccatcacattaaagagaaccaagaacaaaaaccatataatcactccagcaagtgcagaaaaggcatttaataaaagaatgggttgagggagtggagcccatagtcagagcagcagtggtctgggattttggaagtagaaagaagggcagcaccactggccaggaccaccagggaacacccccataggccctgggtgttgtgctccagggagggttccctctggagttattaatcttggtgtccactttgcccagctgcccctcacagggtcagggaggatgaagggaaagcttccttctaatgaaagttcagggactcacagttcctagagcctgtagggagaggaagatcttcgaggaagagcacctgggcattggggcgtttgagaggaagatctatgccaggtccaagtggacaacctgtggactctctctccagggacatacgggtatctgggaatctcctgtagcttaaagaggtaaagacctctccctttagcctgaggactggaggatgctggttcaggtgaatgagtcctgcaggggctggtacaggcctggagggtggtggtgtccagggccttgggttcacccttagcatgattcaggccgggcggtgtttcacatgagcaagagggcctgggttcattgcttcaggacaatggtgaaatctcatggtggaagaaatcttgtccttgccagtgcccagctttcatttggtcttggcccagagtgtcctccctagagaagactcttgtcccttcttcacactgcccttcagggatatgccagccttatgggataagatggggtggagactgtagatgtgggtgggaatctctccacagagtgctccttctctcagcggttgcaccttgtctcagggcttcagcttgaaatctgggatctccaagcccttccctccccagtcctggccaggaccacatgggcagatgcattgtgtgaagtgcatttcatttggggtgtcctctctgcatggcaccctcccgttgattctctttgcgcatgtcagagtgcaggcaccatccacacctcctgctggaggagggacggagctgttgactcctgagagctgatcatgtgttcccaccctcacacacaatcatggtccatcctctgagggacatgtgttgccaccactgtggagatggtgcaactgacagtaacaaacagtaaaatctggtactgaatgggaccttaagccaacaatgacaatgtcattccaaggtgtttcatttttattgattcaatgcaagtcacctgatttcattgactattcacaatagctcgataaagtaaatgcatcatcaccaccactttaaagaggaaaaaggtgcttgggcagtttgtgactactgtggtggctgctgcattgctctctggtaaagccaagtaggtggtgggtgcggcctctgggctgggatgatccaccctcctggtggtggcaggggagccaagctggagccatggcctgtgcagtggtagcagctgaactgaccgctgctgcaggatttgcaagctgttacattttgcgaagccatgaagcacataaaacctcaagtagaacaagtgtttcaaagtctaccaaaatctgccttcagagattattactacagaggtggatatgaacccaaaatgacaaaacgggaagcagcattaatactagataatgaatgaacactagtaatagtagggtaagccctactgccaataaagaaaaaaataagagatgctcattaacatgttatgctcttaaatcacgcagacaaaagagggtctccttatatagtagccacaatcaatgaagctaaagatttactgcaagatcaagctaaaaacagtaggtgtataatgaatttttaacttcatattagtttatgtatatgaatatcaagtttttataataaaatgcctccaaacaaagaatatttgatttagggtttaataacttctaagaggggactcagatgtttcctgtttcacagtcagtctgagagggtcatttttcctggagctgacctgggtggaggcctcacactgatactccccagcatcctctctcctgatggggtttatgctgagcatacagtggccctgggacagctccattctctccatgagtcacagacgctggtcatggaagatccactggataaggttccagagtcatctgtggggcaggtcaggatcacaacatccttttcttctgtgactctggtgttgctgactcagatggggtcggagccactgaccctgtggacaatcagtggaggtgctcaactgaaagtgggctgagggcacgtcttctcctccatccctgggtccttaaggtaactgtggaccccagaccaactgacacaggagctagaaagaaattatttaggaagttagtgagggtaagagcgtccttggcaaggtttcccctttaacaaaaagcagcccaagataattccttttctaacaaagagcagcctgaaaaattgagctacagatgtagatgagcaagatggaagcttgcacaggtgaattccagtaggtgtgccaatagaaaagggctgcctggaagccaggtatgttcaacatggagactccatcctcccttttctccattaccacatgtacagtaaaaaaccaggcaacatggcaccggccaggtagacaatccatctgcatgacaaaagatcagagtggggcagccagcaaatggcacagctggtctaaacaatctttcaccccctgtataaatcagacactgcctcctgaagctcatctataaaaccttctgcatttcactatggaagtggcaacccattttccccaggacccctctctctgtgcagagagctcttctctttctttcccctatgaaacttccactcttaacttcactctgggtgcctgcatcctagttttccatggccatgggacaatgaacctcgagtattaccccagatgaatgatgctgtttcacaatcactggttcagctcccttcttcttagggtttcacagctcggtggggagaataccacgcctcagtggtctggggagtgaggaacaaatgaagaattaatcagattttacttagaacgctatcacctgcctcaaccatcagatccatgttgggaatgtccaggcctcctctcttagatctatacccacttcactggacctgaaatcctgtgtttcccgatgtgttggtgtcactcctatgagaggataaaggagagaactttgctttctctccccactcacaccctgcacaagacagggcccaatatgagacacacactcgctcagtagttctctcatgaaggagggagggagtgacctcgagtgattctgccatctgtagtctgtgtaccctggccagtggctgtatcttcatatgcctcagtttcccctcagtaaaataggacacacaatgagaactaaaaataaaattctaattccccagtgaactgaaaggatggcctcttggccaagcggatcccagagttcctgatcatgacaggatgggaggttacacctcattacagcccctccctttggaagtttagaggtgacaactgactagcattaacgctaaaatcgagatcatgagactgacagaacagactctctgtggccataagataccaaattataaactcaacctaaggtcatgcaggcaagggctaagccacactttcctacatttaaagaataagctatgttctaacacagaattttctttctctctagcggctaaagtaacactagccttcgagataagcaatattgaaatgatcgcggctcatccaccaacactggctaactgacccctgttccaacagccacaactacacttcaattggacaggagactgatttcagtaactttctcctaataagagaccactgagcatggcctggttctgctggtatacagacacggtgcactgagtaccataatgcttgtttcatcttttgatgtataagacctaatttaatacatttaaatctgaattctccaccccaaagtgaacatggggtgcatgtagcatgcatgtttgttgatcacgcatgtgcgtgtacttcctttgtgagtatccatagctccacctataacctgttgaatatgtatacctggccaactcattcagcataaatctatcttccacattcccctcccttgaagtgcctgctattggtctctgctggaggctgcatcttctaccctggggaatggccagcctgcaggctgtaaccctgtgtaagaaataacctggttgggtgcagtggctcacacctgtaatcccagtggtttgggaggttgaagtggtagaatagtttgagctcaggagccagagactagcctgggcagcatagcaagatcctgtctcttaaaaaaattttagggaggagagtgaggatcagaaaaaatacctattggctattatgcttagtacttggatcatgaaataatctgtataccaaacccctgattacatatataacaaacctgcatgcgtatctttgaacctaagataaaagtttgttttaaaaactatctgggtgcagtggtgcatgcctatagttccagctactcgagactgaggtgtgaggagtgcttgagctcgggggattgaggctgcagtgaattatggtcccacctgtgagtagccacttcactcaaacctgggagacagagcaagaaccggtctctaaaaaaaaataaaaatagaaaaataaaatgaaaaatatatgaaataaagtctcctttccaaacgtacagatctccgatttttctgccaacaatgataaatggtcagtggcttgccatgttgtctgtgaattacttttaaaatattcacgatcacctgacctaaaggttggtaccaaggaaccgcctgaatacaccgtctctgattatttgcctccaacagagtgttccctgggcctgatctctggtggacaatgagctgctgggaacatcctctcttctctattcctcccctggggatgctgaccttcccttggagtctcctaagttccccagggcagtcggctaatgtcctagggagcttacctgtcttctccataccaagtctcatgtgaaggacgaggctttgcccttgcccagatgaggctctgggggctgagccctggctggctaccagctgcaagagccatggcccttggacagctggtaaatccttgttcccagtcagccctgcccaagatgcctcaacccagccccggcacaggcttcccagggtcacatggagtcaggatcctgggacaggggactggacaggggtttccagggctgagtttctgaacaggggcttcccaggggtcccctcactccaggatctgacatggtcctacaaggaacgtccatggggaggggacccaggagggggaactgacactgacctccccttactgagcctccccccaaccccatcagactgtccttcctctgtagcaagtgcctgcagggtctggatgcaggaaagaaattctgatctgtggaagtttgtctcccctgtgtgtgtcttgcactaaatgtccaaacccccaaatgggatgtaatgtagagggggacacaggcacagcccaggcctgaaaatcctgtgtgtgtgaagcagaactgacccccaacacccagagctcatgagacatcactgtgtacgtgaaactggccagttacttcttcattcacaagatctgtttttatgacttgtagggtgtaggatcctgtgtcattgttggtgacattctgtatcagcagacatgtattggggtatattgtctctcagcctctgtggcaggtcctggggtaattacttgagttcctagtacatatcctgtaattcccctttgtaccagttgtagccaagcctaaggcagattgtgggtgagtggaagaatctccttgccttctgcagcttcaacagtgacttgggcagtggtaggcaagttccagaaagttaaaagtgaggctaggagtggggagagagcatcagttaatactgggccctatgcattgaggtggaaagatggggccctaggtcctggacaggtctcttcatccctcagccttggagtgtgtgtgtgtgtgtgtgtgtgtgtgtgtgtgtgtgtgtgcgcgcgcgcgcgtgcgtgcgtgtcctactgggccaaggtcagcagcatgacctcccttccttcagtgcctctgaccttggcatttccctgtttggagtccttttccccaggggtctgcctggctccctccctactgccttcaggtcctgctcacattagggcatccttgggagaccccttccctgacacctctagagaccctgggtcttccctttctgacctttcgctgctgtgttccctccagggctcttgtcaatacttgacctcacattctagatacccttgcatgtctgtcttcctccctatgagagcatgagctctgtgagaacagggacttgtgtgatcttggttgcaccccagtgcctgggacaggctgcggactcctgtggatgagctcatgagtgttcccagggcccttcacaacgtgggatttattttccaatggctgaggttgttggctaagagctctgttggagttcaatcaggctggtgggaaaaatattagagatagttatagagatagacacaaatcttcttggaagaccaaaaagtttgcataactttggtaatagatctgactgaaggtggtccctttacctttagttaaacaaattaaagtagtaacaaaggaaggcagagtagtttgtctagccagcttgtttactcatgtgatcttaagactaaccattgatgtgccacaggtgcttaattgctttctacttgggaagtccacaatgtcaattaccctctaacggtgttgactcaagcctttgttaattaatcttactgaataaatatgagtctcactagctgatcaaggccatggtcacaactgtttataggactcagcagggagtctgtaagcggccctgacagactcagctggactggcaaagcaaaatatgtgtgtgtcagtgtacactattcacccgtcccccacagctggtgcccctatatgaggagtgctgccacagagctctgtttagtgtcccttgttttttttcttgagtattaccccaacttaaattgtgattattgtcatctgttttcaacattaactgctcagtgatgattcacttggaaaacattaacaatcgagattgtttcttcactaacaacctcagattatttagattttcctgttgtaatcccttcttcctgtttagtgtccaacagaagccctctgtccctctcaggtccccgttctctccaagaaaccccagccagtctctgtgctccctcctcccatccactcccagggagccctcccctcacctgtgagcagaagcgcctgccagggatgtgcactctgtgaggaggggctgagggaggccccatgggctctgctgtctgctttgtcctcctctgtggagaggagcttgggcttcagaaaataaggaggccagaaagtaaggaacaggctgagaaataatggggatgtgtcgaaaggtcacagatgccaacatctttgtcctatgcaatattatccataaaattacaggtttgagatatgcttaaattttcttctaacatgcattaaaataaacatataacttttaatagttatattaaattgtatttaatataaattaaatgctcttgtcagagctactgtgactgtcagctctgctgtccttcctctctctgtgctaagcctcctcccagggcagaagcacttcccagggccaggggtgggggcggggaaaggtaagtggcaatgaggatctgcacaggtagcctttccgcctcctcccctctcagtcctgcctccttgtcttcttttcctctttttctccaatctacatttcagttccttagaccacgctgtgagaagcaaggcttattgggacccccatcccttaacaggatgacctgtgctccccataagtgacctctgctgtgtctagggattggctctgtcagcacctcacagagagtccctggggcccccaaactcagtgttattttctctatgacacagaaacccctctgggtatgcaaggttttcctcatgttttctaatgtctgggaaggttggatttactcccagcagggaggtcacagagatgtccagggagtggggtcctagaaatggacaaatctagagctaaagcccaggtctacgattttcagttgtttttttctgcagtgctatgtgaccctaatttcctaggagtaactaaaatgcaaacctcagacatttgtagacattttatgatttttctctacagcttgtaccactgttattattatttgctttatgctttttcctaaataaatttactttacaaaacatccttgtcctagtagggtgcaggggctcacgtctgtgatctcagctgcttgagaggttgaggtgggtggattgcttgaggacgggaatttgagacaaaacatctttgtcctatgcaatattatccataaaattacaggtttgagatatgcttaaattttcttctaacatgtattaaaataaacatataacttttaatcatcatattaaattgtatttaatataaatttatatacaatacatttttatataataaattatatatataaatgtatatataatagtttttcttttttgagatggagtctggctctgtctcccaggctggagtgcagtggcacgatctcagctcactgcagcctccgccttctgggttcaaacgattctcctacctcagcctcccgagtagctgggattacaggcgcctgccgccacgcccagctaatttttgtacttttttagtagagatggggtttcgccatgttggccaggctggtctcaaacacctgacttcaggtgatatgccgcctcggcctcccaaagtgctgggattacaggcatgagccaccatgcctggcctatatattttatataattatataaagttttctataataaattttatataataatatataaaatggatatttatttaagataaagttattagttttatatatttacatatatttaggaataaatgtgttactgtgggagcccagtgcccaggcaggtagtcagtacatgatggttgtcattagggttaatactttggaattctggattttttcccaagagagtgtctacgctggaatattgggcttgtggctttctgctgatgtgcatgtgtgaagaagctacttccacttattaggacttgtgtatctgtctcgcagtttcactacctattttctcgtgatgttggtcaagtcgcctaacttttctgtgcctcatttacctaatttgtagaatatgggtaacagtacacaagtgtgagtgtgtatttcccaggactgaccactagagggcgtgaaggcaccggcacttactattacagcaatgggtgtagtagtgctcatggtcgtaaacatcattctcccatgaaaggaaccagggcttcctgggagaaataactgattccagggctggggccggaaagcacaagcggagcctggagcatctcgtgaggccagaaagtaaggagccggctgaaaaataatggagatctgtcgaaaggtcacagatgccaaccagaaggagctttgaatgaccaattttgagacaaaatgagcactataagaaataatgatagtaataaattccaacccataaatacccatgagttcctactaatataaataaataattgaatacataaatatataaggatgaagaaacagctttttcttacagcagaattccaattaatgaatgtagaaggaatgatcaaatagaaaatcactatttggctaacagcacagtcaattgtttgtaggcaagaattatcaatggactttaaatatgaatgggtaaaagtatgatgatgctacaactagtgagtaccaagggggaaaaaaaagtacgttgagaagaaacaggctacttccatattcccaaagtatcacttcaggagctacttattgattataatgggacaaatagtaacttacagtagagaaacctggcaacagagtctctccgaggtacaaaggctctcttcaggaaggaggtaaggggaaggaagaagaaaacactgtcctgcctcaattatttgctttccccattctcaagtgtacttcatagacattcaaagatatgtgttgatagtgtccacgatccacatggctctattatagtcatttattcacacatacattcagtgaggctttgagtgcctaatgtgtgcctgatatttgctagatggtggatgctgagaagatcaggtgtgctgctgtctctagggtgactgaatccacctgccccactttacagatgtggaaattaaagtgaaaaggatttataggattagttcactgtcacaaggtcactagccttaaagttacaggagtaaagcaagtttcctgacttgctagattttctgctgcaggtgctgacaatggtgagctccaataggagagaggacactcagagtgaagtgggagccctgaacaccctggattagccaagaggacatgccgggtccagctgtgaccgcacaaaggaccattggggatatttgtattctctttttcacttagagcttgaaatgaggaaaactaagtgcagaaaaccaagagtggaagatttttcacaaagcactggtaacatgcatcagaaaaccctgtgctgatgtctgtcacggtgtttctcactgaacggtaatagtctggctttgagtgtgttccctctacagcctggagttctgcgaggcagggaccaggtgtgattcatctttgtctctccagtgacagtacacagcaggctctgataaatatttcttacaaaataaaatggaataaaaagtagacatctgcacaggtgtgggatgactgagcagcagcagaagcaggaaaagtcagcgtccccagatcagctgatgtggtgttcggattctagataggggtgaggtgccaggatggggatgggggtcctgtggctctgctgccctgggggacacccctaggtttcacagtgcctgctgtggttgctgcactttgcttccccatgggaaagtgatcagagggtgtggggcttcaggtgaccccatgtgggaaatggccaagggaaggtggggtgggcggcacatggttttttttaaccaatatttgaaggtaggttgtatgaaaaggtgttaggcttatttcagcttatggggagtaggacagggattggtgagtgtgtatcaggtatattttggctcaggatggaaaagaactgtcacagtaacataaggtcttttgggaaattacatgtttactggcagagttcaggccagggctgggtgtctgaaaatacctgtcagggtcacttttatggttacaagggcagagcttggcttggaaccaggtttcttactaataccacatattaagtattataaaaactgtcctttgcaataggacattgctctatgatgcaggttgaggtccctctgtttaagtaattgtgggtggctgtgattctctcatctagtctgcgacttggacttcacctccatctgcagtccctctcctttgctgttgacactggtcagagttaagcgcatttactgacgatggtcacagggtggcagcactgcctctctggtattttctaaaacctcttcctggaactgagccagtctaagaggatgtcatgactaagaaaagggcactaatgaggtgaacagataattttttttttcttgtttctcctgtgaagtaacagagtggaggtgagcatggaataattgccttttagaaatggaagacaatggagagaagtgtttcgcaaaccttaatgtgttcacagatcccacacagatctttttattcaatacagattctgatttttctggtgaggcctgagattgtgcatgtctaaggagcttttggatgatgccattgctgctggttggcggaccacactttgagtagcaaggctcgaagatcatttagaggttaattctcactgcatctaatttatggatgaaaacaaaccaaggtccagagagagcatatacagcttgcctaacaaagccattccctaagtgcctgacttcttgcatttaaacccagggcttcagcctttgtccagttctcactccacacatcacacggtttgttcactgttgtgaacgacagttgtggcagcatctctttagtttaggaatccagagccccaatttcactaccctctttggtcttggctcatgctgtgacttcgaatagttttgcccttacttaaaatcttcagtggctcttttgtaatcacaagatcaagttcgaatatctctgtctagtgttcatggctttataacatatggtatctctttagtaaccttacctaacttccctgttttaaaattgtctcttgctgccatagccctccttgctccttcctgctccctaacaaactgtgttcacttctctctcagtggtagtgatgatggcatggcctctgatgttagactcatgtaacttctaatcccagatccaccaccaacattggcaagttgattcatctttctgaggataagcatcctcctctgaaataaacttagatggcggttgagaggggtaaataaaataacacacaaacccactctcatccctgagaccctcttcaaaactagcatataaaaatagctatttgaagaggttcagtgaaattcaaggtaacacagagaaggaattcagaatcctatcagataaatttaatagactgaaataatttttaaaaatcaggcagaaattctgtagctgaaaaattcaattgacaaaccgaagaatgcactaaatctttcaacagcagaattgatcaagcagaagaaagaatttgtgagcttgaagagataatatatgaaaactcagagtcagagagacaaaagaaaaaagaattaaaagaataatgcatgcctacaaggtttgattattaagctactcaaagagatacaagagaagggtgaaaaccaacataaagaaatgtaaaaaacaatcagaatataaatgaaaaattttctaaaatgctagctagtttttttttgagacaggctcttactctcatcacccatgctggagtgaagtggcacagtcatggctcactgcaggctcaacttcctgggctcagatgattctcccacattagccttccaagtagctaggactaaaggcgtgtgccaccaggccaggctaattttttgtatttttagtagagatggggttttgccatcttacccagggctggtcttgaactcctgggctcaagtgatccaggagattcactgccaaaaaggatataaccaagtcatatagtcataggttatctaaagtcaatgtgaaggcaagaattctaagagcagtgagacaaaagcatcaattaacttataaaggaaaacctatcagtctaacaccagatttctcatcagaaaccttacaaaccagaaggtattggggtcctaatcttttggcttcttaaacagaatagctctcagccaagaatcttgtgtagagtgaaattatatttcaaaatgaaagagagaaatacagtctttttcaggcaagcaaatgcttcaggatttgtcacggctagaccatcctacatggaatgttaaagggacttctaaatcacaaaacaaaagatttaaatagaacagaatagaacctcttgaaaccaaaaaattcaaatggcctataaaacaataacacaataagaaaacaaagtagataacgatcaacatgatgactggaacaaatattaacattgaatgtaaatgacctaacactccacttaaaagacacagattggcaagataaataaaaaatcacaaaccaaatatcagctgtcttcaagagactcacttaacatgtaaggattcttatagactcaaggtaaagagatgataaaagatattccatgcaaatggaaaccataagtgagaaggaatagctatccttatatcatataaaacagactttaagcaacaacagtaagaaaaagacaaataaggcaactatataatgataaaaggatcaatcaaacaagaagatattacaatcctaaatatatatgcacctaactttggagctcccacattcataaaacggttatgatgagacctaagaaaaaagatcaacacaaaacagtgagggtgtcctgggttttctttttattggacagcagtgtactagcctatcactttcccagtcaggggatttttggtctccccattcccctaccatgggttcatgccaaagtccatattttttattagtgtttggaattggattttttttttttgaggtggagtctcgctctgttgcctaggctggagtgtagtggcacgatctcggctcactaacctctgcctcctgggttcaagcaattcttctgcctcagcctcctgagtacctgggactacaggtgcatgccaccacacccagctaatttttgtatttttagtagaaacgagatttcaccatattgtccaggcttgtatagaactcctgacctcatgtgacagggaaacaggcactcagtgaacttcatgcgattgaggagttaatgataatgagagaagggctgtgaggggacagcactggggacaccagagcctgtgacgggctgagttgctgtgccttgggagatgcccttttgactgagccctgggaaggagggggtgtgggggcaggagctgcctgcagagggagtggcctcaggtgggcggccacctggctgcagggaagaggtgacagagttcgtgtgcagagcttggagggtgaggaggaggtgggttgaggtgaccttggtgagggtgaaccatggggggctgtgggccctgctgagggaggccagccagccctggacctacagggtggtttggtcttttttgtcccattcccagcatccactgagtggtgaaactctgcaggccagggaccatcccactggccagaaggagcgcacagtaggtgcccactcagtgcatgttgggctggacagaacctcactctgccccctgcccccagctttgggagctgcagcaaggtccctccccctagggatctccatgcctctgtctctgaggggtgagatggggagacttcaaagggccatctcagagtgtgggggatagagacgcagaagtgtgggggatagagggaggcctgggctctagacccaaaggaccttacacacctcctgagtcttttcaaatggtttcttctgttactttaaaaatgatgtaagtcatcatatttattgtaaatcccaggaatctaatcatgcgtaaaataaggtgtcttatccttgaccccaccccttccccaattaaatttccaggatgttaccactgtttgcagttggtgtgaatctctctttaataatactctgtttatctcacttgtcgttttacgccaaaatacccattgaattatattattgctgaagaccattcttttttttttttttttttttgagatggattcttgctctgttgcccaggctggagtgcaatggtgtgatctcggctcactgcaacctctgcctcctgggttcaagtgattctcctgcctcagcctcctgagtttctgggattacaggtgcacaccaccacacctggctaatttttgtatttttagtaaagacagggtttcaccatgttggtcaggctggtctcgaactcctgacctcatgatccaccctccttggcctcccaaaatgctgggattacaggcatgagccaccacacctgcccagaccattctgttctactgaatcatgtgtggtgggcacctcttatatcaatacatatggattttatcttgtgtttgttattggctcccctttttctcattgcatggctacactcaatgctttgtccacacccctgttcctgggttggaatcttgtgacagaaaatgaagtaacaaaggctaaagctttctaaagtggagtcaggagattgcaagacaattgcactttcaccagcaagagctcaaaccacagaatgttccaatagatttggataaacagctgaagtcagtattcaccagccttcaacatctcaactaggagaaccctaaaattaactaagcacatagaatggaatggacttgtgatttaggattccttctcagccaatgagctgcttctgaaaacaactttttgtggaaattacctgtaaagaaaaccctctcctgtgcttgtcttacagaacactagtcagggctgccctgattcagtggacccgaattgctattatttgtttcctaaacatatggtattttctgtgaccttcatctcaatcttttttttaagttactgggctgtttcccagttttcataatgacgagacattctgcagtgtttcatacacatgtcttttccccatgtggagtattgatccaggagctcattcagtcaacgcatgtttatgaagcatcctgtgccaggctgtgggctggtcactgtcttcagcagagagaggacaggcacagtcttgccttcacagagctcacagctcagggaggctcttagaagtgggatactggtcggagcatgtgcacattaaacatgatgaggtcaaggttgctatagggactaaaccacagtcccaccaagatcgcattgagttcctgtggtagaccagaggtcagggcccctaagatgtcctgagcagctccctctgctcagaagttttggttccacaggtgacacacctgagcacaggtgacccctgcagaacctgtgattaccacccaaagccaagagtgagtggtgggtgttctaggaggaaccgtcacctccatgggcagggttggggaagactgaggggagcaggtggctgatgactttggccagaaggtagggggatgggcaggtgtgcgctcatagggaagggaagagaagggagggcattgcaggcaacaacacaaaggttggaacctgccttcatggactgagaaaagcagggagtccacccaggctgcagctggggagggaagacatggggagcagtgggtctaggggagaagcagactgcgattgaccttggggactgggcagtgagcagaggtgtgttatgtgtgtctgtccccatcatagatatgaggaggggtgaggccgcgggtggcacctgggtcggtgggatttcatagtgcctgctgttccctagagcctctctgtatagagggtcagaatagatctgaggctgtggtctgggggaaggggctggtggtgcttaccatctctaggggtgggaggagagggatgaggatgcccctgagcagtgaagcctcaaggtgtgtggagccacagttgtctctcattagacatgtgttttgcgtgaggatgccagggcctggtggttattactgttgtcaagtttgcatgacaaggacccaggtatccagggatccagagcacagggcccctggtgaggggatgaggctcagatggggctgaccaggttcatgtggtcagagtgggagggactgatggagagacagagcctcaacccctcctgtcaggagctgtggctatgtccaggagagatgacaaggatgacccaggacattgagtgagtcattgagacattgaaggtgaggacagggcagagaggaccctggtgactgctgaaatgtaggatgtgaggagggctctgacccatgcaagttacaggacctccccacccccgagcccacagatgacccttaaattgggcatcctgagtgctgtgtgtgcccagcagggacactggataggctggacctgagtctctgtaagggcagcgctggtctgtaggaccagagtcttctctgtgggtgtgacgtgggcaggaattagcaagatgggggtgacaaggcttggcttggaggatctggtacagaagcccatgggcttggtcagctcagcttctcaggggctcagctggggctggaggagcaggatgctgtgctcagggcatgctccaggcagcgtgatgtgtgtggttccagggtcaggcacgggggtcaaaaattaaccatgaaaagttcccaccttctgtaggcagagaaaatggcctgattgtcagggtcagggagacttaccatgtggccaaagcaggctctcagcctcccagagaccacaccctgggtgcagcactcagctctgcagggtatggcaatagatgtgccaagaaccccaacatccagatgcatgcaaaaattttgcgatatataaaatagagcagatcaagtttccctgcaataacgttgttcctggttgtgtctttttcttgtaaactagacatggacatctttccagcagtctgttctcatctgccaccttcctgctgcagcacctcagaatgaacattcctgagacactgtccgtggtgctgacgaccaagagctatggaacagagtgtgatgtagaatcttctagttacctctgctctcctttcacttttaacaacagagcatcattaacaatgagaaggtggagaggtgttcaggatcttgaagtgacttctgtcttgctctcccataaccctgaagctgctgtagacattattgcagaaactgacaccacagtcaggatggccttgtccaggagcccatgtgcagtttgtagtgagcaaggatgagaaaatggtcttgaaaggggtgatggacagaacaggggcttttcaaaaatgtcacatcatcacccccagcatccgtgaatctgtcacatggtaagagaccttacagattaaatgaaggattatgagtttggaagattattgtagtttatccagatgggtccaacataatcacagaatcccttccttacaaatgagagagggaggtgggagagtcagagaaggaggaggagatgtggggatagatgcagaagacagagcggtgtcaagatgctgcactgctggctttgaagatggagaaagaggacacagccaaggatgcaggaggcctctaggaggtggaaaaggagaggaaacgcactctgccctggagcctccagaaagaacgcagccatgtgggcaccttggttcaagtttctgtgtcacttagcttgtgggaatttgtcacagcctcaacaggaacctacagaggagtcaccttgtgtgcaggtgggatccagggtcatttacagctaaatcctgatgtaaatattgcaggttgcttttcctacttcctatctcatggccaacaaccctggacaatggcagaacacccttggaaaccacggctctgtgctttagtggagggaccagcttgtttgtgggaaggtagcacctggtccaagtgaacctacatgagatcgttactctccccagggccctcagggaagggctgagaacagctggcccaggtgtgtggaggagctgcaggtgaggcagggctggaggggcctgtgggtccaggtagaggggcagacaggttgtcccatcgccatgggagcctgcacgagctttaggttggggaaccctgctcctctgacctggacgctcctgtgtggagaggaggcttgctcagtgagatccacgccagggggtaaattgggaactgatgggaaatgaggggctagagtcctgggtagtgcctgggaggaccttgctcaaggactgaattcttggtctgttcccaccttggttactctgacaacccctctctgtgtcccacggggataaagatctcctgagcagtggccattgggacagaggagaacctggtggccagagctaagcatccaggatcctggatttggggacaggcaagctcattgctgggggacagtgatagatacggcctccagggcctgggtgaagagagcaggagggctcaggacactggaggctgtgtggaggtcacacccacgatctgtaccacccatggatgctcctgcattgctcacctttgtgtggacatcagatggccccaacttttgcactcctgagacatctcatgcattcacagagggacccaggctggggctgtgcatggccttggtctctagggtagtgtgaggacagctgagcactcagctggctgggcaggactcctgcgaatcctgccctttcctgtgtagggtccaccccagcctgactcctaaccccctactcctgtctttccagggaagagagactggggttgagataaggtggagatatttttcctgtgtgacccaggagagaatggacatggagtttcaggtgagtttctgctaagttcccatgagcagaaaaagagccaatgagaggaagtttcccctttattcagatcctttccaggtgaccccgggtgggccataggcccattcactttccctgcaagcccccgcttcctgtggtgatgggaagccttcgccttggcccacccagagcccggggcagtctgttgaggtctctatatattcagcagggacccccatcccttcctgtccccaggcctgtgtctcctcaggactcagagctggttctctggctcaggctccatgtccttccccatccccagggctgggggcttcagggacgctccatcaacccacaggagcagctcccagaggaacctaagaagccacatctgctttgtggtcgatccagcagtaaatgtttgtgtcagagtgtagcaattccagtaaaaacagagaagaggtcttgacccctgaggccttctcagaacagggtctggcatctctctctgggcccacccagggctactctgggactgaacctggctgtgctcagggggttcctgctcccaggcccctccctcctctgctcaccacctcctgttattttcactgcagtttcctgaacttcagctcagccagatgccagtggggacagatcctgggtctccctggggcccaagggaccagaatatctgtggcccccactcacctcatagatgagagcagctgccctggtgctgggtaggggaatctgggcaggggagagaggggtgtcaggggacagggaaggattcctgctgtgtaggaattccagggctctcctcaggtgatggagggtcccagggtggggttagcacagggagtggatgatcctggccctgaacagaggcccagctcatggccagggcaggtctaaccttatccaagtcattctgggtagggtgggtttgtgctggggattgacagtccccctgccctgagcctgcacagctggggccccagtggaaatgggattgggaacggacagtcttacctaggagatggagctgtcagagggtccatggcctggggacagagacaaaagtgagcacgagagtgttaggatagctgggcccctcctgcaagagtgtgtgggggtcctcagttcttagagaattggggagagggagcctttctcaggttattttaggggtcaagtaagcaagtgaggttgaggaagtgacccatgacccagagcccggaggttagggctgacccggccagttggggtttcctgtgtgatgttttatgggatcctctttgcagccccagggatagggtcagaggcccctgggtgtaactggcaggagtggacaacttggggctggcttagtagttcccagccacacccagactgaagggacactcaccgggggtggaggctgggggctgctgctccctgaagtcactctgatcgctggccctaggaaaggtcagggttatttgtgaaggtgcaaggttaaaagtcacaaattggagttaaaataggggaccaggaaaggagcctatttccaagaggggtatggagacctcctttctttatggagttctgtggtaggaggggcccaggtgaggggagttgaggaaaggccttacaaagccacatctgtcctggccagaggggaaggactctcaggcagatgctgggccaggagaacattgatccagtgacacaggaaagggactgaggacccagggaaggaatcagaccaccaggggttgcctgagaggaagggtcaaggcaccagggggaaagcagggccaggcacatgtgcaggacactgaggggactgcatgcatcttggattctcctggaactcagtgtccctgctgtgaccagacactccactcagggctggagatgctgaaatgggacaatgatcttgtcttctgtctctgccctttggcaagagacataaacgacattccaggatatgccatattggggccccggttctcccttctcacagctcagtgtctgcagttaccatgtcagtcaaaggggtgctgaccccacccagcccgtccaggctgttccagtctccactatgtgataatgcccaggatcccccctcagatgccctctcactgggtggatggattcagtgaacagggggaggtaccaggtattgagcaccgctcccccctgctccaggcagctgtggctttgctgtgctaggaaactaggaccatgctcaggggcatggccttaattggactgaattcactgaggacaaagctgttgaggaagcagcccagggtcagcagctggtgaggaaggtgccatggaatgagagggaaggatccctggggagtcgggaggctggggagagcctggcactgaatacaagacagggtctccttccttctcgcctggggtcagcgtgaaggatgggagcagaatggggaaaagctgtggtacctgccagtttttcggaggagcaggaaacacacaagtgcagccaccagaagactcccaaccaggaccccgatcaggatgcctagagtgttgtcatctgctgaaagaagaaggcaaaggggatgaggtccaaatctgttccagggggaaccatgaggggccttgcagggcaggggcatggtcagggaggaaggaaatgccatggagcctgagtgtggtctgttgtgctgtcctcatagctggctcccttgctctccgtggttgcaccattttctgtgtcttaggcttgaattactgggatgcatcaactcctacattctcccacaggaagcctgcacctcatcctgctcctgtgttttttagtccctccttcctctcacatcactcctcttccccctgtttctttttttccatcccatggcagtcgtaaagggcaggcccttgctgccaactcaatgctgatgagcagggatgatgttcattgactgttttcaggggccttccacatggaaggcacagtgggaatcaatctacctgcagcttttctcaccctcccattgccttgagggagaagggtatgtgatattgtgaaatacgtatttggtgttcatcaccattgatatggttaggctctgtatccccacccaaatctcaccttgaattgtaataatccccatgtgttatgggagggaccttgtgggaggtaattgaatcatgagggtgggttttttccatcctgttcttgtgatagtgaataagtctcaggagatcagatggtttcataaagggaagcttccctacacatgtcctcttgcctgctgccatgtaagacatgcctttcaccttccatcatgattgtgagacctctccagccatgtggaattgtgaatcaattaaacctctttcttcatacattaccaagtctcaggtatgtcttcattagcagtgtgagaatggactaatacagtaaattggtaccagctagtggagtgctgctataaagatacctgaaaatgtggaagtgactttggaactgggtaacaggcagaggttggaacagtttggagggctcagaagaagacacaggaaaaaagtttgaaacttcctagagacttgttgaatggttttgattaaaacgctgatagtgatatggacaataaagtccaagctgaggtggtctcagacagagatgaggaacttcttgggaactggaacaaaggtgactcttgttatactctagaaaagagattggtggtattttgcccctgccctagagatctgcagaactttgaacttgagggaaatgatttagggcaactggtggaaaaaaaattctaagcagcaaagtgttcaagatgtgacttgggtactgttaaaaacactcagttttatgtatttacaaaggtatggtttggaattggaacttatgtttaaaagggaagcagagcataaaagtttggaaaatttgcagcctgatgatgcaatagaaaagaaaaatccattttctgaggagaaattcaagccagctgcagaaatgtgcataaacaatgaagagcaaaatgttaatccccaagacaatggcaaaaatgtctccagggcatgtcagagaccttcctggaagccccttccatcacaggactggaggcctaggaggaaaaaatgtttcctgggccaggcccagggctcccctgctgtgtgcggcctagagacttggtgccctgcatcccagccactccagccatggctaaagagggccaaggtacagctggggccatggcttcagagggtgcaagccccaaaccttggcagcttccatgtggtgttgagcctgcaggtgcacagaagtcaaggattgaggtttgggaaccttcgcctagatttcagaggatgtatgaaaatgcttggatgtccaggtgaaagtttgctgcagaagcagagccctcatggagaacctctgctagggaagtgttgaagggaaatgtggggttggaaccccgacacagagtccctactggggcactgcctaatggagctgtgagaagaagaccacaatcctccagaccccagaatggtagatccactaacagcttgcaccatgcacctagaaaagctgcagacactcaacgccagcctatgaaagcagccaggagtggggctgtaccctgcaaagccacaggggtggagcccaaggctatgggagttcagctcttgcatcagtgtgacctggatgtgagacatggatacaaaggagatcatttcagagcattaagatttggctgccctgctggattttgggcttgcatggggcctgtagcccctttgttttggccagtttctcccatttggaatgggtgtatttacccagtgcctgtacacccattatatctaggaagtaactaagcttgcttttgattttacaggcttataggtggaagggacttgccttgtctcagatgaaactttggacttggacttttgggttaatgctggaatgagttaagactttggggaactgttggaaggcatgattagttttgaaatgtgaggacatgagatttgggaggggtcgggtggaatgacatggtttggctcttcttcacccaaatatcaccttgaattttaataatccccacgtgttgggggaaggacccagtgggaggtaactgaatcatgggggtggattcttcccatgctgttctcatgatagtgaataagtctcacaagatctgatggttttagaaaggggagttcctctacacatgccctcttgcctgccgccatgtaagacatgccttttgccttctgccatgatttcaaggcctccccagctatgtggaactgtaagtcaattaaacctcatttttaaaaaaattacccagtctcaggtatgtctttatcagcagccaagaccagctcggtcgcggagatcctaacccagcagtgctagaggaattaaagacacacatagaaatatagaggtgtgaagtgggaaatcagggttctcacaggcttcagagctgagagccccaaacagagatttacccacatatttaataacagcaaaccagtcattagcattgtttctatagatattaaattaactaaaagtatcccttatgggaaaccaagggatgggccgaattaaaggaataggttgggctagttaactgcaacaggaacacgcccttaagatgcagattgctcatgctattgtttgtggcttaagaacgcctttaagcggttttccaccctgggtgggacaggtattccttgccctcattcctgtaaacccataaccttccagcttgggcattagggccattatgaacatgttacagtgctgcagagattttgtttatgaccagttttggggccagtttatggccagattttggggggcttgctcccaacagactaatacacccattttctggtatgtgactctaaagtccttagaatcttcaaagtgatgtctttttcaagctaataattgactgatgactggcagcccctaggcaacttcagaatgaggctggtcactgacccaggtaggattagagggttgggactttcagcctcacccctaatccctggggagggacctggagtttgaattaatcaccaatgaccaatgaatcaattaatggccaatgattgaatcaattaatggccaatgattaaatcaatcatatctatgtcatgaaccccaaaaggactgggtttgaagagctgaacccatggaagtttctggagtgtggtgcatctggggagggcatggaagctccacaccccttcccacatgccatgctctgtgcatctcttcatctgcatcctttgtaaagtcctttattacaaaccggtaagcctaagtatgtgtttccctgagtcctgagagctgtttgagcaaactaatccaacccaaacagggagtcatggaaacctcaatgtgaagccagtcataagaagctctggaggcccagacttgtgactggtgggaaggtggtggcaattttgtgggactgagccctctgctgatatgtccaggtagatagtgtcaggatggaattggaggacacctagctgatgtacggtgcagaactgattggctgctgggtgtgtgggagaaacccccccgcatcacatttggtcacagaagtgtgtctgtgttgatgattgttattgtggagtgagagcagaggaaaaacacagtttgagtttttccaaacagggtggaatcccatctgccaatttagaatctgaaacttatagtttcagtacttcaattaagattgaagtacttcaattcagtacttcaattaagattcagtacttcaattaagattcagtacttcaattaagattacagaactggtaagtgaaagtgatacaacaaaaatgtaaccaaagtctgctcaacttaacagctaataacaacaaagttcataaaaataataccagtcgatattgatagcactgattgagccctggctctgtgcatgaccttgttaagggctttaatcgcattaatctctgaataaatatcctcacaaccaccctgagatccaggtgtttgtaacaattctacagatgaggaaactgaggcccaggaggttgagtgtcttgcccaaggtcaaatacctggtacctattgtaaccaggatgataactggatgagtctaatccctgagttcttacccacattgctccccaggctctgaaggaatctcatccttctcattccgtgtatcattttacaccccccctccctcctaggaaaatatacaaggaaaggagtgagaggggccgagggtcactcacattttacagtcagcttgagggggtcgctcctgttggagctgactgggttggagacctcacactgatactccccagcgtcctcctgcctgatggggtctatggtgagcatatggttaaaccaggacagcttcatcctcttcgtgacctgcagacgctggttgttgaaaatccactggaaagaggttccagtgttatttgtgtggcaggtcaggaccacggagcccttctctgtgactgtggtgctgctggcttggatggagggctgagccactgactctgtggatagagtgaccaacagaaagtgtcttggggccatgctgcatcctcagagatctcagagtcaaatttagaacattctcctgtgaataaaggagaaagatgaaggacagggaggagcagagagaaccagagacacccatagcagcgagcagtagggactacagtgacctcagagaccccagggaccaggaggacccagctgcctcagaccaggaccagggagccctgaaaaccctcccacagatgagcggccccagagtcacatgagatgcaatacctggggtggctttaggagcaggcagtcagagaaatggaacatgggtctcagcccctaagggacaaggaagaggtgtggccagctcctcctaggatcctacatccaggacccagtctgtaaagaggttatgattattcctttcttttttcattaattccctccctccttcatcagagaactactgagtgtgtgtctcagttgggccttgtgcaggtacagggtgtagtgggaagagaaagctgagtcctttccttcatcctcccatgggagtgacatcaacaaatcaagaaattcatgatttcacgtccagtgagggaagaaatgtggatctgatgggagaggcttggacaatcctggcattgagtctgatagttgagacaggtgatttcgttctaagtaaaaactgactaattctccatttgcccgtcattcctcagaccagaatctccctctctgagctgaggatgcccaagaagaaaggagctgaaccaacatctggtcctggggtccacagatgccccacggtggtggccacgaccagattctgggctgcagacacacggtggtgtgacgttgagcactgacagcctgtgtgatgctgatgcaatttctctttaataaaatggggtaaatgtcaatggtccctggcttgccatcctctctgtaaattaacattaaaatatttacaattacctgacctaaagcttggcacagaatagctccaaataaacatcatctattattattttactccaaaaaaaaaaaaaaaagagttctctgggcctgattcctggtggagaaggagcggtccagagtgtcttttctctgctttccctcctcctgaggacagtgcacttcccgggacatcttttaagtttcccatccagtttaatggcctgggaagtttgtttgtctgtcctctccactctgactctcaggtgaaagatgaggctctgcccttgcccagatggggctctgggggctgagccctgcctggtgaccagctctaggaaccacggccctgggacagctggtaaatcgttgctcacaatcagccctgcccaggaagccacaacccagccctggcacaggctccccagggtcatctggagtcaggatcttgggacaggggcctggggcaggggcttgaagggctgagcttctctcagaggatcctcaggccaggccctgactgagtcctataagatctttctcaggtcatgtctatgaggaggaggccaagcggggttggactgagactgattttcccccgctgcatctcccgcatcagactatccttcttgctgtagggaatttccacggagtccggataagggaaaggaattctgatctgttatagtttgtctcccctgggtgtgtcctgcactaaatgcccaaaccccaacatgggacgtaatgcagagggggatgcaggcacagcccaggcctgacaatcctgcgtatgtgaagcagaactgacccccaacacccagaggcacggaggaatcactcaccgtatacacggagatggtgagatgcctgttcaatctgagaatttctgtatgtgacttgtagggtgtagtatcccgtgtcctctagggtgacgttctggaaatgcagatctccactgggtgatattgtctctcgaccgctgtatgcaggccctggagtcctaacgtgagtgtctattacatatgctgcgattagctggttgggctccaccgttttccctttgtaccagccatagctgtaaagattctcgggcagataaaccacagagagatgaacattctccccttcagcaacttcaaagggcgctgatgcaataaagagccaggcagtggtgggtgcgttccagaaagttaaaagtgaggctaggaaagggagagaatatcagtcaatatttgacctatgcattggcatggaaagacggggtcctgggtgcaggtctcttcacccctcagccttagagggtgtgtgtgtgtgtgtgtgtcctactgggtcaaagtcagcagcatgaccctcattccttcagtacctctgaccttggcatttccttgtgtgaaccctctttcccaggggtctgcatggttccctccccactgccttcagttcctactcacacaagggaatccctgggagacttctttcgtgaagcctcctctagagaccctgggtcttccctttctgacctttcccagctctgttccctccagggctcttgtcagcacctgacctcacattctagatctctttgggtgtctgtcttcccccccatgagattgtgagctctgtgagggcatggacttgagtgatgttagttgcaccccagtgcctgggacaggctgcagactcctgtggatgagttcatgagcgttcccagggccttccatatcctggggtttatttgctaatgtctgaggttggcagatgaagacagagtttcatgccctggtggtgtttttatttaaattgtcactgtgatatagttttactatcattttcaaaatgtagtggccactgacaatgaacttgaaaacatggaccaactgagattgttttgccccttggcaattccagttcacttagattttttggttctccttagacgctctctcccctgagtctctaacaaaagccctctgtctcctctcagagccccatcctccccaggagaccccagccagtctctgtgctccctcctcccacccactcccagggagtcctcccctcacctgtgagcaagagcccctgccaggggatgcattctctgtggggacaagctgaggggggccccatggtctctgctgcctgctctgtcctcctctgtggagaggagcttgggctccaggaacgctctagacagggttactgtgactgttgtctctgctgtccttccttcctctatgctgagcttcctctcaggcaggagcacttcccgtttatgggcaagggcggggctctgcctacaatgtctctctgtcccctcccctctcagtcctgcctcccttgtccctcctttctccttcctttttgcctatatttggttccctaggcaaaactttgagaagcaacgctgatggggtcctcataacaggacgacccactctccccagtactgacctctgctgtgttctggccttggttctgtcacagccggtagattatttccctttgtgacacacaaaaccagctgggccctgggtctcctcatgctctccagtgctccaggaaggcagaatgatgcccagcaggaaagtgacagaggtggctctgggggctagaaaggggctcactgggtgatggctgggaaggacccacccgctatcttcagtgtcaccagcctggcctctgacccagggacagagacccaggcctggaggtctcgggaggatccccagctcctaggtgtggagggaggtgtcctgtgtgtcctgggaagagaggactttgatggaaggaggtgggaggctctgggttctgctgtccttggtgaaggtttcagggggaccctctccatgtctggggtctgtgcccccagcttaactctcattctctttgcaaatacatatattttgtggatctgcagttgcctgaactgtctcatgtccctaaatctttgtatccctttttacagaaggtcaggaagggtgtgtacatgagtatgaggactatctgatcagggcgagtgtttgtttcccaaagatctctttagatatggtataatacataagataaatgtactgaattagcaattttaagtgtagaattaaatgatactaattctattcacaatgttgtacaaccatcaccataattttttaccagaaaatcttcattataccaaatggaaacttcatacttttaatcaataactccccacttccccctgccccacccactggtagcctctgatactatcaatctctgtgaatttgcctagtttacatgtctcatataataaggaattatatacgtgtattatttttttctggattatttctcttagggtaacacttttaagattcatccacgtcgtagcatatattacagcttctttcctatttatggctgagtaatatcccaatatatgtttatacctcaattttaattcattcatctcttaatggacatgtgggtggtttccacatttttgctattgtgaaaaccgctgcaatgaacttacacttggaagtatctgtttgggtttctgtgttcatttctttgggggtacatataggagtataaatatggggtcatgtggtagttctatgtttaagtttttgagaaacagccaaactgttttccagtttgctgtgctattttatattcccatcagcaatatacgagggttccattttctctacattcttgtaaacacttactatttaatattttttaaaacttatagccattctagtaggtgtgaagtgatagctcattgcagttttgattttcatttccctggtggctgatgaagttgagcattttttcatgtatttactgacaattttaatattttttagagaactatttattcaaatcatttgctgtttaaaaaaaatgggttatctttttattattcagttgtaatagttctttatatattttagatacaagtcccttatggggtacatgatttgcaaaatttttctcatattctgtgtcttctcactttcttcatggtgttctttgaagcacaaacatttttaactttgatgaagttcacttatctatttttaattttgttacttatgctcttgatgtcatattgaagaaaccattgcccaatccaagatcattaagttttactcctatatgttcttctaatggtttgataagttttgctattccatttaggtttttgaaacattttgagttaacttttgtatgggctgtgaggtaggggtctaactacactatctcgcatgtggttatccagttgttccagcacaatatgaagaggctaccattctttccccattgaggaatcttggcacccatgtcaaaaaccaatgggctgtaatggtgagggtttatttctggactcttgattctattccattgatctctatgtgcattcttgtgccagaagcacactgttttaatgattgtagtgttttagtaagttttcaaattaggaagtgagtcctccaatttttttttccagattgttttggccattctggggtgacttttaaaaaagatgtagttcaatggttctcaaagcaggagtggttcagctctccttttttggcagtctggagacctttttaggaccttaatctaagtagataaattattcccactttcttttctgagttgctatgttacagtgtatattgacacccatgaaataattgagagaccctggaagtgcttgcctacatagtgagggacaattagttccatgatcatgggcacagaagattttgttttgggaaacaattttgttggtggagttatattcatgcttactcttttatttgtcttcatagcctgcatctccttcagacttcatatctgtttattttcttgtttgtcctctggggtttgggtgttgggtgaccagtcagctggagctggaggaggtgcttagcaaggcagtgaccctggttgggaggagcagggctcagcagggtgaaagtagctgggccttgagtcaggagtggcatctggaaggcctgactgtaagggtcagaagggccagcaggtgggtgtcctaggcacaaacggtggctgctgctgtggactggaggaaggtaagaggccccgagtattccatgttcttactggctccccaactgaggattcctctcctgggctggtgctgtcctgcagcagggaggggttagacagggacggctgcacatcaggccggagtccatgtcatcctcttaggcactgtcactacagattgaggattctgttcataagccaagcctttgcacaaggaagggacccgggctctcaaggaagagcagctcctggtcagacctccatctccttctctctcattgcctgaggcctcaagcttggtctacctggcacaggggtctggatcctcctcccagggttggggtcttactgagctgggcacctgcaggtgggagaagatctggaggggccccatctgccttcaccagattgatgttgagggtccctgagtcctgcaccactatcaggtgctgagcaacttccagtgtcagtgacaaccaccccatggtggaagcagaaccacctcgtgagaaagcacctccaagcctcagtgcttgccatgtgtgggaatttgctggtttcagttgggggcatgttggtgggtggtcatgaattcagggccggattctatgctcacagtgcacatgctggatgtggtacagaccccaggcagggctcagtggggtggttttgggtgtgcacaggtatcttttctggaggagctggtggtgatttggctcccagaagttcctgagctctgcagactcaccaagcactcaatatttgagtgaacattgggcgagagagcagaaggtaagtgtcagggcatcggggttggtgcctctgggaagaggaggaacattctgggaacaaagctctcccccggcttacagggagcttcccatcgctcctgccttgaggatcagggaaactagggcctctgctcttccaggggctgcttgcaggcagtttgctctgggagggggtgacccaggagttgcctctcattttgcatttgagatttaaaaggagaagggacagtatatcttgccaggtcacaaaaattacaggcatcatattgactgaagggcactcctgtcatcactgcaatataccagaatggtcttttaaaaaaataagtgatttaggtttaccagcaactgtaatgcttgttttattcttctagttcaccgttaatgtcacttttgtagttttagcactggcaatgttgattttatgttgactctgatgattttaagctttcatttgttcacatagagatcatcttctttctgaatattaatgcattttttctctatttctactggttattcctgtacatagagtagagaatcacttttcccaaggaggtggaaagcttctgactaccaaaaaaaaaaaaaagtgtcaaaatgctttaaagtcagtaacttaaagatcaaatccaagagtgggcaacagattctgcccagggtctgaaaggtggagaggtgactggtgaggatgtttaaaagacctctcctctctactccctaaatgggggccatccagtgttcttgaggttcagagaaggcccagggctggggcagcagggcactgtcagctcccagctcccaggggccaggagtaagaccccaacactgtccagacactgattgcattcattttgggggagagtagattcttatttaaagaataatacaaaagtctacaaatatgaacataaacagaaattcctttgctacaattttccccttaataagacattccttcctaatgacatatgtgactgcattcatggctgagatgttttctaggatggtgagagcatcagagtggactatctggtgccttggggtcatgcattttcttcttccaatgtctacaggatcccccatgtcccactttgtagtgtaactcagtgtgtgtcattctggtttttgttgtatagatccttggaaagcccatgtcattcctgctgtgaggtacaggcagccaaatggcatcatctctaaacatgccttctcctggtacatcaaattatggaataaatgaaagccattttgacagatattgaagatataagtttctactcttcccacacatgcttctcccaagtgaaggattttactggtgaattgttattagagattagtgtggatcagtgactctgccaggggaaattttgccctctaggggacatttggcaaagtctggaaacattgttggttgtcagagctgggggagggagtcctgctggcattgagtgggtggatggtgctgaacaccctgcagttcacagagccccaccagtttgaccacccaaatgtcaatgctgaggagtggagagccctgctgtgccctcccgcagcttccctgaagcttcccctcacctgctcctcccatgtctccccaccacttccccacttcacccgcctccttacacctcagtcccctccacctgaactcaccccttagtccaaggccagccctgatctccgctctcctggtctccttgctccttagcaggaggcgcccactagatggcgcccttgcccttactggagctcaccgtctccctttccaccctgagacaaatgtggctgcttttactgccacaaccccagccctccacactctagatttgctcagggagcagctcctggacagacctcagggaccccagggaggagcctcactctggagattttgatggcatggtctttgaacttcactgttacccccagtcaggatccaggatgttgggagtgcatgattctgcccggtcccacttcagcaggaccccactgctgagttgtctgtggggacccgggcctctcatctccttcttgcattgcaggagagggatcttagcactgctttcacataaagtcagataatggaggagtgcaggtgagtttgggaaggtggacatgaagagaggttgtgtccctagaggtggcagcagtgagaggatgggcaggtgggaggaacacagcccatccagggttgccagccatattaggagcgacagcctttcctctaagcctccagcctttttcctgaaacattccagaactttccacttcagcacttcccactgaggctcctcaggtctgtccctgagctcccagctgagcctacctacccatctgaaatcctgagtcctgtgtcaccctcgttccccattattctgtgcagttctgtgggacgcccagctctcctgacacccccagtcttcagaatggccatcagcgctgtcgctgtggcaccagggtgactgccgcctggaggctgagtcctggcttcctgacagctgtggggcccgctctaggctcccttgtcctgatcattcatcacctccaggatgcacagcagctgggccagggggaggagcagggacaggtgtcagccaccctgtgtgtctgcaagtcaggctgggggtgtgggaggacgccaggaatgactgaactttctgatttagagggtgagagcttgcactgatggaatttgggatttaataggaaaagcatagcgttttcctattttgtaggcagggtggctggagtttggaatcatagattcccctgggatgtcactgtggacctcagtcccacccgttaggggcacagatttcagaatccacaccctggggcaaagcaggcatgggaggctccatcagcctggccagggctctctatttgtgcagctgctgcaaggagatgtgcactctgatgggaacagtgctccctcctccttggggggcagtatctagctccctgcagcccctctccctgcaggccctgccctctctgaacctcaccttccccaacccgccccccgcaatcccatctcagctgtaatcccaacactttctcatccattatgggtggactgcttgagcccaggggttcaagactatgctggctggacaatatagcgagttgttgtctctacaaaaagacaaaaattagctgtgcatggtggcatacacctgtagtcccagtcactcaggaggctgaggtgggaggattgcttgagctggggaggctgagttggcagtgagttgagattgtgccactgtatacttcagtgtaggtaacagagcgagaccctgtctcaaaaaataaaagtaaaaaaaaaaaaagaaatatggaatacattattgttaactctaatcaaccatgctatgcaatagtccaccagtaataccagtaatagccaataatgaattatctgaaaaagaatacaatttattcttagctatctactgctaaaatttttaagctatcttttatgatagctgaaacaaaagaagtaaatttaaccaaggaagtaaaagacctttataatgaaaactgtaaaacattgatgaaataaattgaaaaagacacacgcacaaatagaagatattccatgttcatgaattggaagaactgatattgctaaaatgtccttaccacccaaagtggtctacagattcaatgcaatttctgtcaaaacaccaatgatattcttcgaagaagtagaagatcctaaaattagaaaccacaaaaattcctaaaacctgcacaaaacaccctgagttgccaaagcaatcttaaacaaatagaacaaagctagtggcattacacttcctgacaatcaaagcatactgcaaagctatagtaaccaaatcagcatggtcctggcataaaaacaagcacatagatcaatgaaacagaataaaaatcccagaaataaacccatgcatctctagctaactgattttcagccaaggagccacatgcacacaatggggaaaggacagcctcttcaataagtggtgctggggaattggatattcatatgcagaagaatgaacctagaccctatccctcaccatgcacaaaaaattaactcaaaatgtattaaataaagacttaaatgtaagaactgaaactatgaaactactagaagaaaatatagggggaaaatccatgacattggtctaggcaaagagtttttggataaaatctcaacagcataagcaacaaaaccaaatataaacaaacgggatttcatcaaactaaaaagcttttatacagcaaagaaaaaaaaggccagcagagcaaagagacaacctacaaatgggaggagaatatatttgtaaatatatacatatatatttgtaaatatatacatctgataagaagataatatccaaaatatataagaaaattatgtttctgtatagttttatctgactgggatacagaggccacatccacagtcccatcctcaaaggccacttgttcccaaaatgtcaagcacatccctcaatgatccatcatcaacacctatgtctgtaggatgaagggtgaatcatgaagcactaaaaaggaagaaggaagccaatcccaaaacaaaatgatgcagggtctggaaagtccaaagcattttttttttttttttactgcatcttcctcctttcttctccacattcccaatcctcactattgattaacaaaacaaaaaaaactgggacccaccatcttccctactgtcaggagatctagcgagattgtttgagtcttagaccaaactttgccataagccaaatttctggctgactttacaatgatatgagctagcacagtctctttttctgccagtcaacttgtgctcggttttatttgcaaccaaatagaggtggtaaccaaatataggtgaccctaaaattagtcatcaggatgaaatcctaaaatgtgcaacaaactgggttgaattcaggattagtagcaacatctctgttgtgggcttgaaaagggggcacccttttatgcagtagcaaaattgctaaattgttgtttgctgagtctttggactctcatcccggattttctatgaccattcaaacagggctgcaatgaacatctatggttgtttagcttggcacacttctacatttctatatagtaatatctagaagtgcatttgctcaatcacaagatatgcacattttataattgactgctatcgaactaccttaaatagccttaatttgttctcaacattgtttaacagggtctgtttaatgtcctacgtccagcaaggacagtatcacttttcttaatatttttcaaattattggaccttaacaaatacttaatgtgcaattaattgattcctttgtattcccatgccttcttttatatgtttccttatagtacacaaaaccacattattgtttctttacttgtgtcattccaccctggaccattcctatctaaactataacattatgagagagagagagagagaaaacaatatgaaaatataaattgattaatcaaaaaaatttaaataggacaaatcaggaagacacaagagagattttaaaattattcagagaataccacaatagctgtaccaatatattttaaaacttagatgaaacggacaactatctcgataaatgtaaattaccaaaactgactcatgaaaaaatggatattatgaatagagcaataatcagtaaagcaattaaaaagacagttgataatttttatttactgacaacaataacaaaatttcaggtcctgatatttttatggtgaattttaacaaattttcaagctcctcctcaaccaattctcagaaggtttaaaactttaacaagaaaacactttctaacacattttcagaagctgttatagcatgataccaaaaccacacaagaaaattatagaccaatctcacttacaaatatacatgcaaaatcaaacaaaatcttagtgaaccaaattcagaattaataatagcaaacaagcaaaatatgttatcatacgtatggcttatatcaggaatgcaagtatgtttcaacatcagaaaatacttctccacattaacagactaaaggagaaaaacgcttgtttaattatctcaataggtttttagagaattttgaaaattttataaagttatgcgtattctgtaaaattgatgaaatccaaccttgatttatttttaaaaattgcctttcctatagaattataggtaaaggaaacacatgcatcctcacagagctacttcaaggctaagttacttcccataagtaacgtatcctgtaatgtgtgcttggcacatattcaatactaaacaaatatttgcaaatcctcaaaccacttctcgctcaaataacccacctttgtcttttgcctttatgttagggttgattttctcaattgtatcttggagatcctttggtgggtctttcagcaattaccctgaatttgcttttctgtttacaattttaattcctgggaactctttcttgttctctgactgcacccttttcatgagagttcagccatcaatcctccagaaccccaccccccccgcccccccaaaaagcaataaagatgtctaaaagcttccttctgggctttcgaatgatgtttaccccaggcatttgttctattcgttcatcacccattttccctacaacttgcctacacttgatatcagatttttatttattagtcacctatcttcttcattggcccattttcctattttgccactggttgttctcaaatgtgttatgattcctggttgtacagtcaagtggttgataatcttggatatacgataaagatttgctctgtagctgtgtgtaagcctatataaaagcttttgtatttttcttcttaaaaaagacaaaagatggttgggaagatccctccagttcaccagttcgaggctgcagtgagctatgatagcgccgctgctctagcctgtctgtctgtgaaaaacaaggggggcggggggcgggggggaagactggagatgtaaatctcccgcagggccctacccgtatccgcaacaggtctctaacaggaacagcctcaggcctgtgttggaacaaggtaggttacagaaatctggaagccagatctgtaacttcagggtaaggactggctctcagggctgatcccccgggctgggtgtcccagaggcacccgcccccgccccttccccaaggcaggccaggacaccttcactcctctccttaggctccccacccccttctcctccccactgtgcctcctggagtagcggtggcggtgccacaggggagcggggcggggcgggctctgagggcaagggggatgggccccgccggggtcactggcggccaccctggaaactcgacgcaggccggcccttctagtgaatcgtcccagccacagctggcctcccagccgcgcttggggcgcctcggggcgcgaatggtgcaggttggggagactcaccacgcaccgtcgggggtcggtccggttattcctcaccgctcggctccagtgggcgcgcgggcctctcctcctcagttcctgcgctgcagtccctccctcacccttcgcagcttgggaatccaactgtgtcattccgacggagcgccgtgaggacctccgagggtgttagcgccaagtgatctctgtccagcgctctgaatatccaagtaaaggagttcaatgaagggcgggtcaacggaggagaaaccgtgactctctcaagggagcccaaggcctccttgtctaattagtgacgcgccaatggatggaggctcttcccaccatctcttcccagcatccagtgacaccaccgccaagggacgggctcggcggaacctgcaggaaagaagcatcggctgagcctgactgcagcgctgtgaagagacaggggaggggatcagtagttggtcccgcgcccaccccctgtttccgcgaggggcggagttgactggccatgcaggcagagggcgaaatgtgaaattccactactcctaccgtttttccctgacccgatggggcggagtgtcgtcaggctaagttccctggcggtaaggtggggagattgaggcgcacacctgccgaacggtaacgcaggattagctaaggcgagctcaggacagaagcctcccgaggagcaggagggcaaaataataaataaataaataaataataaataactcactccttggtctttatttgcggcaggaattcagaaggtgaaagcggggccttaggatctttctgaccttttgggttttaagcaggaggtgtcagaaatgttaccacagggctagctggcttgtggccagcaagcgttcacaatgccctcgatttttcatccctctctgtgggttctttttttcattgtaaggcagaatttctacgattgctcacccactcagagaacctgagctggtttagaccaggtgagacaggctaggtttaccctggtgatgatgtgttgttgccatggcgatcctgcccagtaccagaggccctgcagattcagatgcttggtgcctgtgcttggctgaggggccaatgggtgaagctgccatctgcgggatgatgactgaagcctctaagtcagaatccgcccaggctgagccttagggcagctccatggagcctcggctggcctgggatagagagtccaccactgtgccagcccccagccactgcctaggtcctgtgctgagagccccttgtccagggaaatggcgtccagtggaaaagggaccacccccttgcccttcactcaaggcaggttggtgacaaccctgaagctaatccgttcctagaggagctgcttctgggtccgagttttctctgcagcagagcagctccctggatgggatctgttcaaagtccgcctttcacgcggaattttccgtccttgcaattttccacctccaccactaggggatcctctctgaccgcctcatgccggctctggcctctgagcaggggtttctcttctgcatgtgcgaccttgcgcatgcctagtggccttttgggacctagagctgctccacaccccgatggggttacagagtgcctcgcctccactccaccccaccagggttccttccctggctgggatgggatttcagaagcgccgaggaacagcccagacaggtgtgggagagtagccaaggcccctgtcccggggtggccaggacagcggtggcctcgcataggacctggctgggctgctgcaatcagtgtcctgccccttggagagcaacagtgaaaacaacaagactatcttcacccaccttaagaaagaacagaaccagtatccccaactctgctgtgtatcccaacccaattccattccccaccccactctcagtagccaatatgcaaaatattagaatactcttactgttattattttcaaccacactctgcatcctgaaaaaccatatatttcgttatgtgcttttaaacttcttgaaaatgaaatactgaggctgggcgcagtggctgacacctgtaatcccagcacttcgggaggcggaggcaggcggatcacgaggtcaggagatcgagaccatcctggctaacacagtgaaaccccatctctactaaaaatacaaaaaattagccgggcgtggtggcgggcgcctgtagtcccagctacttgggaggctgaggcaggagaacggcgtgaacccgggaggtggagcttgcactgagccgagatcgcgccactgcactccagcctgggcgacagcgccagactctgtctccaaaaaaaaaaagaaaaaagaaatactgaattttcaaatacttgctttttttttcggtcaaaattatgttctcaaatttcactcctgtagatgtgcgtggctggctgtagtttttgcatttttattattaggtattctcctgttgcattaatatgccacattttatttctctcatgtttttggtgaccacttggggtgttttttggttttgtatttttgctgtatacatgctgccatggtggacatacctctttatacatatttcctgttgtatgcagacacaattttaggatgtgacatcttcagcttttctattgtgtcgtgtgtcttttccttcgtgctttgtgttatttacatattctggacacagattctttgtcaactgtatgtgctgcacatctctttcccagtttgtgtcttcttcttcttttttttttcttaaaaaaaactttctttatagtgttttttttttctttctttctttgttttgttttgtttttttgagatggagtcttgctctgtcacctaggctgaagtgcactggccgatctcggctcactgcaacctccgtctcctgggttcaagtgattctcctgcctcagcttcccaagtagctgggattacaggtgcctgtcaccacacccagctaatttttgtatttttagtacagatggggtttcaccatgtttgtcaggctggtctcgaactcctgacctcaggtgatccaccctctttggcctcccaaagtgttgggattacaggcgtgagccacagcacctggcctgtgttctttcttaagtagatgttacttttaatataatagaatgtatcatattttgcttttatattagtactttttctatctaattcaaacacatccccaagggtctttgtgtgtagactgaccaatttctcaagaatcatgaatgaatactgcttctctttccccaatttatctgtaatgctacctttattataaagtttctatgcatgtgtagaaatagttcctgatttttcactctgtgccaccagcataccaatagcacgctgtcttaaatattaaatagcagagctttatgagacaacttgatgtgcagtaggcaattgcccccttgttactcttcttcagggttctttgttgtaccacatgaattttagaattggcttgtccagctaaaagacaactgcaaggattttatttggaagttcataattctatacataatttggggaaagtattttcataataccaagtcttcctattaatgaacacagactctctctctctctcccccacccccacctgtttagttatttatatctttatggtctgttagttattgtttattgtctttcaaccaggtttcatgtttttctacatagaggccttgcatgtgaaagtctttcttcctagcttgctattacaaattttttttaattgcactttttgggtacagtggcttgtactgtaatccccgatacctgggaggctgaggcagatggattgcttgagtccagaagttcaagaccagcctgggcaacataatgaggtccctgtctcaaaaagtttgttttaaaaattgcatttgctgttattcaacaaatgtcattgtgtctcatatatggatttttatatctgataaccttgttcaacaatcttttgattctaacaatatatcagattcttttgagttttccatatagacaataatgtcatctgtaaattataattgtttcttctttgttatttcttggaccttttattttatatttttgtcttgctgcaaggcaatatccctctatatattgtggggtcttttttctcataaagtggggatggtgaacacccttgtcttgctctctgattgtataaagcatgctttctgtagcattttgtagacgctcttttttagattgaggtaattcacttttatttctggtttactgagtttttagcataaattcaggctgaatttgagctaaagctttttctggagacatcatttgaaaaattcatatgatttactttctttaagtcaccaaagttatgatttacattgaactgagtttctactgtttaactgtattcttgggagaaaacccacttgtcactgaacaatatctgttttatttactgctgtcttgtgtctaaattttcttttaggattttttgtatatgctcagattagcctgttattctcctttctgtatttttttctggtttgggggtcaaagttataatagcctcacaataagagctaagaaaccagccctaatggaggccggggcaggaggtttggagttcaagaccagtctgggcaaaatagtgagacccccatctctatgaaaaatagaaattagccaggcatggcagtgagtacctgtagtcctaggtacttgggagggtgaggcaggaggattgcttgagcctaggaatttgaggctgcagcgaactatgattgtgccactgtactccagcctggatgacagagcgagaccctgtctcaaaagaaaaaaaaagaagaaataaaaaggaaaagataaaagagctaagcatctgtttccttttttccattttctgggagagtatgtgtaagactgtaattaactgtttcttgaataatgggagaactctgtaaaataatctggctttggtgttacctgtattggaaggatgaaaaataccaattcagtttcattattggttgatagggctactcatgctttttgttttgttttgttttgttttgtttttgagaggaagtctctctgtattgccctgttgtccaggctgagatgcaacgttgttcacaggcctgatcctggctcactacagcttctaacttccgatctcaatagatcctcccgcctcagccttcccagtagctaggactacaagcatgcagcatcacatccagcctcttttcctgcctgacccagttctggtttcctttagttttctaggtgttcatccattttatctaatgtttaatgcatttggcataagggtgctcagtgtcctttcattgtctgttgtctgtaactgttgccattttcattcctatttatgagtactggcgtcttctctcactttttcttaataatcctgctggaactttgctttttaaagaacatcttttgacttgttgattcttttttcatacatattaactattttcttattttttgcctttatatttatttcttttcctgtttgaaacattgctcttttcttactataaaaatgggtaagtagctcatgaattaccacctcttttaaaaatcttttctactgtaagcattttagcagtttacatttgcccacaagtaccacttcagctacaccctatgtgcttttacataaagtcttcatttttggtaagacatattctcaaattttaattatcacttgtttttaaatccatgatgttttatttgaaatgttgtttctaaagatacattttctggttatacttttattcttctaatttagcacagtggccacaaaacatggtctgtgcagtgcatacaatcgatgagtaatttctgagctgtagtatttggcataatatatggcaaaatttcctaagttttccatgtgtgctttaaaaaacttccagtaaaatacataaatctgttagatcaagcttctcacattgttcaaatagtctatatgtttactgattcatttgactgcttgatttatcaattacaggtaggaatgtattcaaatctcctattaaagtgtgacactcaagtggctttttaaagacagagatgccaaaccaatgaatacatgattttccccaaagcctgcacaaattctctaatgaaattttaccatgaaagtttgtttaattaaggcttactaaagcagtatgttgtcttttactttttaaacagagaatatatattttaatacatcgtttaagtttatgattaattatctattactgaggataagaatctttgcctgtgctcattcagcatttgcacttcatttatgatctgccttctcatagcttctgttaatttttatactagagacatttatttgtttgtataaatgttgaaggtttttttttgttgttgttgtttttgagtcagagcctcgctctgtcacccaggctggagtgcagtggcatgatctcggctcactgcagcctccatctcctgggttaaagtgattctcctgcctcagcctccagagtagctgggactacaggcatgtgccaccaagcaaggctaatattttgtatttttagtagagatggggtttcgtcctgttagccagggtggtctcgatctcctgacctcatgatctacctgcctcggcctcccaaagtgctaggattacaggtgtgagccaccgtgcccagctgggttttttatattataaggagatgtaatagatagatagatgtttcaaagatagtcaaatgtttttaaaatttaaaacacttttttacaggttgactttcaccatttaatttcatctatgtgttttgccttagagaaattttaaatgctatgtagatctcatgacttataattatgaagcattttgttttctgttttccacgaaacttagcttaactttgagcatataatagttgtaaaggtaggagagtaacactgaaaaaaggaattgcataaaaatggcacattttctgtagagttgtttatcgcctgaaaataggccccatttcatggaagtaagatgatcaggctcaggtccccagacgaaactcttggcatggtttttggagatagtccagggctcagtactggctctatcatttgctacttctcccaaagtaaccaatatctcatccaccctgagcccatttccatatctctaacatgaggataatagcatctaccttacacaccaagtagagggatcaaatgtaggaactaaatcaaagtaccagcactgaataacctacatcctcccacttcccaaaaggaagagagatgtatcccctgttgacaaacgagaccattttgcaggagagaaaggaaatgccagttcacttgcaatgtaaacatgctctctctttttagggatgtccagggacctgagagagaacccatgcttaccaaagagtttctagttccagacacacaggactcgaagggtgacaagtatggttttcagggtccctgaatccacccagtcctcacagaaactcctaaaagctgtcgattgacagcgttgagttcacagctctggtcctcacatgctgatactgcttgtgatatcgaacccgacaggaccccacatcacaattgatttaccaactacaatataatacctcctgaatctccaaattggctcacccaggaacaaaggcttggggtaaaactggattaggagatataagctctgaattttctgagggtgagacacacaaggattctaagtgacacgccacagagtaacgggtctgtgactggaggacccacagatttgtcttactggagacaccacatgcacacaaactccatccttagctgtggaaacaagggtcttttgctatcttagccgaattctgggagtaatttttggaggggaggagatctttgggattgcctctttcaggccctttacaaaaatacctacttcttaaatggtaaagcttacactaaactgaaaaaattacatccttggctttttatgaagtaggtgttggattgaatcactactggaagaagtatggcatcgcaaattctaagcagtggtcaaaggatggatctgttaaattagaaaaatctctaaatttataaaaagattttagattcctttattctaaacaattgacctatttgtactcatgggacaatcaaatttcaaaggagatatgtaacgatttcatggcttgcattaaaaatccttctgataaaattaaagataaaaaatctgaccccctgccaaaaaaatcttttgaagttcatactgcctgctttcaatattctgtgggattcacaatgaaaggtgccttatattgtggcctagcttcaagtttatgccttcgccaccatggcctgggttcaattcccagtcagggccccagcgcctttggtttaatgtttgcgtggcatttgacttttttacctatttagtattggtgagattacctttggtaaaaaaaagtttaaagagtggaaatcgcaattctttgtgttggctaaaatctgattataagagatctggaaggttttatttttctttttcaaagagctctatggtcagaagtcggcttcatgaaaagctaatatttaattatatgtacatacagtctttctggattttctcttttgcctcctgttttgaaaaatatttggatttgagtgaaactccgttttagaaattaattgcttggtacaatatacccatgtaactaccctgcacatgtaccccctgaatctataataagagttgaaattttgacaaaataaaattagattttgaattaaaacaaataggtgcttggttcctctgctcacttctttttaaaaggaattcctctcccatgtacttcttcttttcccttctttaccttccttttggcatctttggtatcacatgaagggatctagagggaattttaagtgactctgaaattccttgagaaatacacaaaaagatcccactcaccccttttgggggtctcctgttctccttgtggagtccagagtcagggacaggctcctccaggtctgcagctctgctctcttttatttcatcttggctgattgctttggttttgtgagtaccaggcattactttgtactgtgagagacacgtcctttgtgagtgcaacggctgctgggtcactggtgagggctgcagtttggagatggctgagagccgttgcaataaatggttgtgattgcagggggctccttgtttctttgcaagtttagatgagaaaggtgcagtttggacacagtttaaaggctgtgaaaacaccaccaatgaatatgatttcctttggggatggtctgattaaaagtgggctgattgttgctgtgctactagccttgaagacatgtttctacagcattgtgcagtgtggaaaaattgtgtggcttggtcttgtggcatgtcccttcttttagagacctcagattcaatgtgaaattcgggatttttgattttcaaagatctagatgccctgccttccagatgtgcctactcttcacatattttaaaattagatcctataaactgcaaatactttgttggcttctgtgagatcagaggtccagttagaaaaggaagacagtttgttaaaattaaaaactatttatctaatctaactagattggcctccaaatatgactttctgacattcagctggttactctgaaaagatttctaaatctcttgaggctcatctatatgtttccttgcaaagaaaaaaaaaaaaaaaaaaaagcaagcccaagcactagtaagaaaaagatttgcaatgtttcatgaaaggagtagatgagtgaagcatttatttgtagatactgggttggatacctgtgcaaagaagaagaggtcaataataaaaattgccaggggatttcttggaacttaacaagctgaattaaatatagaaatgtcaggaaatcaaggcaggaaatactcacttgtggttaggcagacagggcagggttctgagcttgagatggagcaaacagttgtggtgggtgaagttcacatgctttagagctcagctgtcctagtaaagaagcctaagagtctctaaagctcttatgagaagatggattttttttgcctagattaaaaggttaaagaattgctttaagttggataaaataaagctaaatgtttaagcaagttgtgaaaggtttatgaaaaaattaattaaaatatttttgtgtgtaaacatattgactaaagttgaaggggtataattcagcatttctgtaaattgagcattgaaataaaaacacaatgggtttctcttagagcactaacctgctctttaacaaaaattgtaaagggttatagaaagtctataaaaatgttaccttatggtcaaacattaaaattgggtaaatatgtctatcaggttttattaagaattaggtttaacattaatagtacactaatgtaaaggtgaaatttggcttatttggtacaaaaatcatacaggaagcattgtgaaatataaaatgatttttagctttctttgggctatatttctataaatatgttattgatgagggttccaaagttatgggagactcctataattctgctatatctcagtgtacattatcagtcataattataattgtcatgttaaattattgtgggccacagaggtaacagatttccttgtcaattgtgtctttgactatgactaccctaaaacgttcagtcacccatatacacatgttaccttgttttggccctctttagaaggtaattttataatcagctataaagccctaacaggtgctcttaaatgcaaattttgataactttggagattgtgacatcagaagagaggaaaaatgttcgggacacttggagagctaaaatgttcattgatatcaagcaggacaggaattaactgcatgaagtgaactaataggaggctgaagtgatctttttgactttttgcttaaaacgttgctgatcctttgttttgcttttcagagtcaaggcaaattttcttttgagctattgacagcttttaacgattaatcaaaatatactcctatgaacaccatttggagcattatttgtttctctctacccgatttccccagaatttggaaactatttgtgggtattcttaatttatggcaatatagttatttgcataagtgcaataagaatgtgttttctttggtaacaggacacaatttgaaaaactggttattttaccaaggttttgaccagaatgctgtgctttcctttaaggaatcaaacttgacttgtggagctaataaagcctttggaaaactgaccttatatcctgtgaacacagtccctgtacagggttactgatctgtgggaagaaaagaatgtcacattctgacaggtcaggaatcccaagttatcttgaaacttcaagaggacaggaattcacccaaccatatgtatttgatggtagaaatccatggcaggggctcagctttaaaaagtcttatctcagattccttctataaaacaaagtcccattaaaaccaattttaaaagcctatgtgaaaaataattattcttgctgcacctcgtacaaataaagtggcaaagcataataaagcaaattggtcctgtcgtaatttgtctttagtaaaaacgggaaactggggtcgggtgcagtggctcactcctgtaatcccagcactttgggaggctgaggtgggcagatcatctgaggtcaggagttcaagaccagcctggccaacatggtgaaaccccatctctacaaaaatacaaaaatgagccgggcatgatggcgggtgcctgtaatcccagctactcaaggggctgaggcagggaagcggaggttacagtgagtcaagatcgtgccacttcacgacagcctgggtgacagagcaagactccatctcaacaacaacaacaaaaaagggtaactggagagagggaagttatgtttcaaaaacttttggaaactatagtacacctgtttttaaattctagtctggcattcagtttttattattttctacagtttgggttaaattcgtatttctctggctacaagtctcctaaataatcttttcatttgtttcctttttctttccctttttccccatttttcttaattggaaatcactgaaacctaagctgtgctttcttaaagccctgtgaactgaagactagacaaccgaaacttctgaaggaagtagcagcaacctatttatatgtgttgctgttgcctactattatgttttagcaggtgctgcctctacacccccgaaacagagagtgctactgggaacaaatcgactttttccactccagtgctgcattcggtgccccataacgatgaccccctctcagcaggaagtagccagaaagattacaatgctccatctccctatgattcttgtgataaataaatatacaagcatgatagaaatcatgcgcaaattgacagtggggattgtggcaggccagatttcactaatggaggtccccatcacaactacttcagtactgactgagtggttaagttcagtatcaaaagctgaaagtgccagcgcctttctacaaaggctagaatgtaacaaaagcccaccaagggttttacctaggcctttcctgggccttacagcatgacaaaacaaagaaggaattcttaaccagacctgtttaggattaaacaaatttaattgggggtctgaagaaactcgccaggcctccacaaacaagttcattgggggtctaaaggaaccccccccaaacctctgtgattgagcaggagacaaggtcagggtaattgccccagcacctggactcatttagatttaagtaaatgtactgaggctccagagaaaggtctccaagacttagactagagttacagattaaaagaagttaatcacttatatctttagataaatgcacactgacacgtagacatacatcttagaaaatatataagctctggaaaaccttgtaatttacagttggtctggagatattttctgggccttctctctgtaaccggttccagaaataaaaaactctcttcctccccagtttatctgcatctcgttattgggccgtgagaaatagcagccagaccctgagtttggtctgggaacacactggctgggcttcctgcctggcggtagagcttcactgtcctccttcccagccaaaatgtggcccttgaaggcttcctccccaactgaccggttttgggttctaggtactcagggaacaccgtcttcaaggaggccattttcatactgttcctggtttgatttttctgaaattaggaaatgccccttgaggcatccaggattgtctttatttcccctgaagcttcccctcctgaagaaaaaagttctcaaacaccctcaggactcaaaccccaagttcaccctgtgaaacattcccatttcctaaacccaggcaggctcatggccctcagcctctcagaccccatggaaacctcctcccccacttcacgggttctctccatattgagagcctcccctcctcggcacacaacccagagactcaccccaacatgtgtagcaaatcaccctggaaacaatcatggctgaacgtggtagcccatgcctgtaatcccagcactttgggaggcccaggaggtggatcacctgaggtcgggagttcgagaccagcgaggccaacatggtgaaacctcgactctactaaaaatacaaagttcactgggcattgtggtgtgtacctgtaatctcaactactcaggaggctgaggcaggagaatcacttaaacctgggagacagagattgcagagagccaagatcgcaccattacactccagcctgggcaagaagagtgaaactacatctaaaaaaaaaaaaaaaaaaaggaaaaggaaaagaaaaaaaaaatcatgaggcaacattgcatttaacaatattttatttatcaaaagacacttgtctttctcaggtaagtgaaggtctagagatgaaacgagtcccgatgtaaattgccccatgggcattgctgagatcacaagatcatcactgcagcatgcagcacaatagtaaatttctcaggatggaagttcaacaatccaaaaggtagtattttttttcatgatgctcagtccatcatacgaaataaaaataaattccttttcatgatcatccattcagtagaaaaaatgatagtaaatttgttctcatgaagatttttaccgtaacatataggatttatcgttattattattattctttgttttttgtttttttgaagcggagtctcactctgttacccagtctggagtgcagtcgtgcgatctgggcacactattaacctccacctccagggttcaagcatttctcctgcctcagcttcccgagtagctgggattacaggcatgcgccaccacacccggctaattttcgtatttttactagagatggggtttcaccgcattggtcgagctggatttgagctccggacctcgggtcatccgcccatctcagcctcccaaagtgctgggattacaggcgtgagccaccgcgcccggcctcaatttatcattattcacgcatccacaaactgggttcttatattttgtacgtgattttttccattgaggagagatatctgtgcatattcatgctgctcatatttcatccacaaactcggttcatatttcatccacaaacataattttttccgttgagaagagatacttgtacatatttatgctgttcaaattcacatttcatcattcttttacaagaaatagataatgtattttaaggttttccagtggtattacagatattttactgggtgtatagatagaaattaaaccaaacttctttgttctggccgccagtcatgcatcctgttttcaacatagttcacatacaactggttgtgtaaaaatgaaattattttgtttagtacaatcatcaacagttggttgattagatttttaattatcaagttaatcattgtcattatgcttctcatcgcactcgtcattaattgctgtgggaggaaatttgttatgttccctatgagagggtgtatcacaaattcaaataagaattcaacgacaatggactgtataaaggaaataagcaagtccatggaaaacatatttttttccggaaaggattaaaatatttttaaaaaggaattaaaaaaaaattgggcacggtggcaaatgcctagagtcccagctgctcaggagatggagacagaaggattgcttgagcccaggaataagttggaggctgtagtgaacagtgattccaccactgtactccagccagggcaatagagggaaaccctctttctaaaaagacaaaaagaaacaaaacaaaacaaaaaaacaccacatcaaaaaacccaacaacaaaatgaaaaaccaaataacagcaatacaattggagctattcgatccaaagaagtaaatgaaacataaagcaaataaaagagaaaagctaatacctgtgtcctgcaggactcagtccaagttctgctctgactccctcctggtgagccaccccttaaaaagtcacttggggcggggttactttgacagacagtcttctgtcaaagagggaggcggtaaatagcacttttttttttttaatttaacgcctttccaacaaattagcggctatgttgtctaagagtgcaaatgtcagaggtgggtacaggcagcaagaccctccccacaggggcagcagaaggaggaatgactaagggaacaagactttagtgtgctcaactacacaggacaggaaacagatgctttttacaaaagctggtggacttgaaggcagaatattttcaagttcctgtaactgcgaactatgacctgtagcctgtgagagtgactttctgtggcaaaggagcttttgtgaatgtgaggaagttaattatcttaacagtgggaggttctcccggcttatctagctagaccctcgtgaaatcccaagtgtccttaggaaggggaagcagagagagatttgagtccagaagaggaagaaggtgatgtgaggcccagtaggggaacaaagggcgatggcatgtaaacacttagcccccagaagtgggagagggctggggttcatcacaccagaatccctaacaatcagccttattttaattacccttgaaatggaaggaggccttagagagccagaggcttggaggggcaccctctgctgcatacacagatcccaactgctgtgggctccaaataattgcaccagggaaatcacaaattatcaaaaataaaggatgtaaagcttttaaaaaatattaaaagcccaacaaataaaaaaagttctaaatctataaaattgacctcagtctgtatatttagatgagtcatgtgtatatagcgtttcacttcaaaatatatgataaatctctcattcattggcttaaaaataaacacttcaatcaagtctttatcagaaaaattgaaacgttaactcaattgccttttagttcatgtgactttacaaaacttaaaacaataaagtcagttttaaaaattattagtaaagtaaaagaaaaatatcttcacaatgtagacattttgtccacatgagacatgtgaaatattgccattactaaatatttgcaggtcaaaaactgtttccaaaacattttaaataatcatctggcctgtctgttttagagcattcaattctagctgaggtctggggacatgtgaaaggagccacggcccgactccgtgctgggaagagtcagacattttccacagctctgtcctttgctgtgggctctgcaactcctaccaattaaaattgcttacgtttttgttttatttttactaaagaggggttcctaaaagctaacattatactgagtatatgtaactaaaactactaagaaaacaatttcacaattatacaaatgtgccaagtaaatgaaaaaataaactgtattttaataaaggttataaaaagaaaaacatatagtggtgtgaggactgtctcaggtcttcactgagcaagggatcatgacattctatggcggacagctgaccttggctttctgctcctcttgattatgtctactaagtgacatacttactctttttccacctgtcttgcctctaagggtaacaggttttatgagatccctcctagtgctttgcaggtcagcctccctttgctgcattccaattttactgcctataccctccagctggcttttgatgacaaaagtcctggtcccagccattctcagattctgtcatccccgtgggcactatggagctcagcactatgggaggttccccaaaaatctcgttttctatgaggaatggccaccacctgcatctcagtgatgctagtgacccctttcctactcctgtgctcactggtcctcatgaagatcctggttggtctgtagccccctatttttcctattaaagagaaattacagtaagacccatttgtgtgcaaaatcaattttaggcttattacacttggcctgataatttgcataaaatgcagcaagaattcatcggccatataggctacttttgagttaattttcctgggtttttacctaaaaatatactattttggttagagtcttgtgaaaataaccaatgtgttcaattgttttattttaaaaggctcttactgaacactataaatatgtataagttgaatatacaaactatattgtcataaaatcacaacccaaaatgtggagaacgcagagggaaaggtaaatttgctcgcaaaaacatacttcacccaaataactggaaaaaaaaaaagactttcatgacccttctttaaccagagcagcagctttcaaacaaggtgtttgccttggaaatgccattcacaagccaaacggcccttgagagctgtctgtcaggcactgtagaatctagcagctcctcacagagttagaaatagtttcaggaaagagattccctgcttttagtaactgcactttatattcccagatagcgagattgtatgtaaaccatttttatcttattctggaactcttttgggtactttttttttttttttttaaatgatggagtctggctctgttgctcaggctggggtgtagtggtgcgatttcagggtatgagaaaatgcagctggacctggctctttccaggaagaccctcacagccaaggagtccaaagcctggggttttcatctaattccagtgtgactggggtaggagcagctttggtgctgggtgtgtgtgtgtgtgtgtgtgtgtgtgtgtgtgtctatgcctgtgtctgtttagggtgttaggctcgtggttgtctagatacaaatgtcccagggctcaggagccccagggttatgtcaggggcaccagatgaaggtgtcaacagaagttagggcacaagggacaaaggtgagagcaaggttagattcatttaggtgcaagaaatcatagagggaggagggagaggaagccctcctgctaccaccgaggaagaagcgcagcttaaggcagaaagcctgtccggagaggaagtgagtttgagggcagggctctctgggtaaagtacggtctgggacaccagcctgggggaagggtacagaatgcagagtggcctggcgtggggactaagaacagaggagagcagctttcactgggagggtcagtgttttcagtgtccagcactgagcaaggtgagatttgggcagcttgctgtgaaataaggtcaggctctggcattgtccccattgcgtgtgtgtgtgaggggcactttgggagagtgaactctccacctccatcctctcatacgtccttcaaccgagcttgccagttaccctgattccaaggagatctatttattgttgacaatactggatcctagcagaggctgggtaggagcctgggcacaagcaagtggaggagggggcctgggcctgaaagacctgggaggtttgagagaggacacagcccacagaatggagcagatggggtagagtcggcaagcattcagggctcctagtaagttggacaatggagaccctgaaagatccagtaaaacggggagaacaaacaggtccccaactcacatccttgcagtgcctggagcttcagactccagacaggtggggaaggaaaattgagggatgtgaacatgttggagaatgtcgtgccctgaagaatgaagaaaaggggggtgaggaatgagagcaggaacggcttccagtgcctggtgcccaggagaactcagaaaatgggtgtggtggagaggaatcgaggaaccggaagtggtggaagtgtgcagggcccctccgagatcactgtgactgccaggcgtcctccctggctggagagcttcactgtcctccttcccagccaaaatgtgtcccttgaaagcttcctccccaatggactggttctgggtcctatatatttgaaggggtggcctgcctctccacacctgtgggtatttctagttgggtgggaggagagacagagaaaagaaataagacacagagacaaagtataaagaaacaacagtgggtccaggggaccagcactcagcacaccaagggcctgcaccggcaccggcctctgagtttcctcagtttttattgattattattttcattatttcagcaaaaaggaatgtagtaggagagcagggtgataataaggagaaggtcaatgaaaaacatgtgagcaaaagaatctatatcataattaagttcaagggaaagtactatgcctggacgtgcactcaggccagatttatgtttctctccacccaaacatctcagtggagtaaagaataacaaggcagtattactgcaaacatgtctcacctcccgccacagggcagcttttctcctatctcagagttgaacaaatgtacaattgggttttacaccgagacattcagttctgaggggcaagcaggagacagtggccttcctccatctcgactgcaagaggctttcctcttttactaatccacctcagcacagaccctttatgggtgttgggctgggggacagtcaggtccttctcatcccatgaggccatatttcagactatcacatggggagaaaccttggacaataccccgctttcaagggcagaggtccctgcggctttccacagtgtattgtgcccctggtttattgagactagagaatggcaatgacctttaccaagtatactgcttgtaaatattttgttaacaaggcacatcctgcacagccctaggtcccttaaaccttgatttcatacaacacatgtttttgtgagctccaagttgggtcaaagtggctgggtcaaagtggctggggcaaagctacaaattaacaacatctcagcaaagccattgttcaaagtacaggtctttttcaaaatggagtctcttatgtctttcctttctacatggacacagtgacagtctgatctctctttcctttccctacatatattcatggaccacagtcttcaaggagtccatttcctcactgtttttggtttgatttctctgaaattaggaaatgccccattgaggcacccaggattgtctttacttcccccagagcttccactcctgaggcaggagcttctcaaacaccccccaagactcaacacctaatttcaccctctgaaaccttcccatttcttaaatccaggcagggtcatggtccttagcccctcagatgctgtggagaccttctttccctttcatacattctctcaagattaaaagccacccctcctcagcacacaccccagagactcaccccaacatgcattgcaaatcaccctggaaacagtcataagaccacactcatttaataatattttatttatcaaaagacactctttctcaggtaagtgaagttctggagaggaaaagaggagtcctgatgtaaattgccctgcaggccttgctgagatcacaaggagattgttactgcagcttgtagcacaatagtaaatttcttctctggatggaagttcaacaatccagatcgtagtatattccttttcattatgctcagtccagcaaatgtgatgataacaaattccttttcatgatcatccattcagcagagaaaatgtttgtaaatgtgttttcatgaagatgtttaccataacatacaggatttaccattatcaatgcatccacaaactctgctgttgttttttatacataattttttccatcgagaagtgatagttgtacatattcatgctgttcatatttcaaccacaaactctgctggtttttttatacgtaattttttccattgagaagtgatacttgtacatatttgtgctgttcatatttcatgtttcatcatccttttacaataaataggttatattgtattttaagtttttctaactgtagtgcagaaattgtactgggtgtatacatagatatcaaaccaaatttacttgttctggctgataatgcatcatttatttcatagattatgtatttctttgacacatttcacgtacaactaattgcataaaaatgaattttcttttagtatagacatcagcatgtgcttaattcggaatttaattgttgagttaaacatcgtcattgccttttccgttgttattaattgctctggtgggaattttgttatctcatacataagacagtgtgccacaatatctcttaaaatttcaatggcaataaactttatatttaaaaacagggaatctatggaaaacacatttttttctaaaggattaaaatatttttttaaaataattttctaaaaagttaggcacggtagcaaacgtctagagtcccagctactcaggaggctgagacaggaggattgcttaagcctacgagttgggggctgcagtgaactgtgattgcaccactacattccagccagggcaatagaagttaaccctttttctaaaaaaaaaaaaaaaagaaagaaagaaagaaaaaaagcaacaacaccaaaacctcaccaacaaaatggtaaagaaaaaaaaaacagcaatacaatgtaagctatttgatccaaagaagtcaatgaaatttaaaacaaatgaaagggaaaaagtaatacttgagtcctgcaggactcagtccaagttctgctgtgcctccctcacggtgagccacccctttagaagtcacttgggtcataagttaacccgataggaagtgtcctggccaatgaactagggaggtggtaaatggcaccattttaaatttaaattcacggccttttcaacggatcagtagccatgttgggtaagagtgcaaatgtcagaggtgaaaagaggcagcaggaccctcccctagtgcttgggcaacagaaggtggaatcactaaggggacaagactttagcatgctcaagtacacaggacagaaaacatgctttttacaaaagctggtaaatatgaagagggaacattttcaagttcctgtaaccaagaactaccgcctgtaaccggtgaaagtgactttctatggcaaaagcgtttttgaaaaggtgaggaagttaaatatcttaatgttgggaggttcttctggtttatctggctagaccctaatggaatcccaagtgtccttatggagcggggagcagagagagagatttgagtccagacgaggaagaaggtgatgtgagtctgggtgcgggacagggggagaatgatgctatgtggggatctgggctggggaatgacttagctgcatgagcggagtgacttagactcctgaactagaagaaatctagggctcatcacctcagcagccctaaccatcaaccttatttttattacaggtcttccatcgacggactccctaaaaagccagcggcgtggaggggcgccctctattggacaaatagatcttgactactttcggccctcaaatagcctgactaggcaaataacaaataataataatttttttttaaatcatggaaaatattttaaaaaacaattaaaaagttataaatctataaaatctgcttctgtctgtgtgtctgtatatttagatgtctcatgtgtacataatgtttcactaccaaaatatatgatgaaaccctcattaatcggcttagaaaactaaacacctaaatattttctcagaaaatacaaaaactttaactcaaatcccttttaattcacctgactttaaaaatctttaaaaaataaagcatgctttaaaattattagtaaagtaaaattagaacatcttcagaatttagacatttggtttaaattatacaggtcaaatactgcccttagtaaatattttcaggtcataaacaactcctgtaatcttttaaataattgaattacatgtctgttttagagctttaagttctagctaaagcctggggacaaatgaagggcaccatgccccctctctgtgctggaaagagacattttctacagctctgacccttgcagtaggctttgcaactgctacctatcaaaattgcctacatcctaagtttattattaaaaggagttgcttggagttaacattataatgaatatatgtaactaaaactatttctcatacaaagtatatgaaaaagtagaatgtatttttaataaaaagttataaaaagacatgaacatgtagtttttataaaaaacagtaattttgtctagttttgcagttctaaaaagttatgttaaattcaaaaataaaaaataacaagacaagactcaaggtttaaataagttgtaaaagatttgtaaaaattagttctataaaaattttacaaaaaaaagcattggttaaaatttaaggaattattttgtttttacagaaattaaacattcattaaaaacactctgatacaaggccttaatttgggttcatgtatcagaatagcagggttttcttagaatattaatctattctttaaaagaactatgaatgttatgcaaactttataaaaatcttaccttagagtcaaactgattaaaattccatagattttacgtaaaattttattaaaaattaacttcaacaaaaataaaatttgattttctcctttaaacaaaagttttgcgtaatattaaataataaagcatttttgtttaccttttaaactataaacacacacacacatacacatacaccaacactaaagtcagctgacctcatactgtctttattggatattcttgtttaaaaaactatcttctttggaaaataaagttttttattttaaaccatattttaaattatcattttgactaaatccataacatacagtgatctgtaataattctattttataatatcaagtgttttgaagaactccaggaacagccatgagagaacactgtggtttagtaacactttatttcctcagtttgaaaatagttgtctttcttggggaggccggtttcagcagatgaaaacaagagtcatgatgaaaattacccagcagtggttagtgtgaccataggaacattgtcatcaggtcagcagaaaacatatcagcaaatttttctcatactggcagtgtgtaggggtggatgtttacagttcctgaagccccagtggtcgtgtggtcttttagttttgccatttataggcaacttgtggtaactagctcaattagacacattccttatcacaaggacagagggctttctgtatcctagggttcttgccttggcattccagaagaatcaggtcacacgtggacgtggagaatgagtgcaaggttttattgagtggaagtagctctcagcagatgggggagccagaaaggagattggtttctccctggattggggccgttcagcagccctggctctcctctgactgccccaggcaaaatccacatcgttctataagtcggtgccctgctggtgtgctggtgcctgttgtcatgttcctcttcatgtccagccgcctgtgtgttcctccgctgatgtgctcctctcgacgtcaagcctcctgtgtgtctgactgctagggtcttggggtttttataagcacaggatgggtcttagcaggccaggatgatcttgggaaagacaacattcggtcaggaaaacaaaaatgcctgttgtcatctaggtccgtggggacaagcccaggtgtggagcttttagccagggaccacagcctcctgtatccaacacttcccttcaccttttctatatcattcaaagggatcatgcccttcccatcccagcacttcactttcatgtcatttgccccctctgaagaggtacatctaactgccattagaatatggatgatgaccagtcttagctgcttcctgctgaaagggggcattgttttgggggaaaacggcagtcagattcctcccaggggtctctataataaaagatcgaggtggctactttcaggaggtcctctaatgtactatctggtcccaagtcccatttctgcaacctcctcctgatgtcaggagctgcctgagtaataattttatcctttaggattatctgtccctcgattgaattaggagatagagaggtgtgatttaccaaggcctctcttagcctctccaggaaggcagtgggattttcatcaaatccctggttaattatggacaacttagtataattgagaggcttggtcttagacctacgtaagccctctattatgcacacctgaaagtgtctcctcttccagtcttccatctcattattgggatcccatttagggtccttcactggtgctacttctcttccagttggataatattcgctcccttccctgatgctataggtgatgcaaagctcatccccaaatctctctgctgctggcagagcagcctgcttctcagtgtctatcaggttctgactcaaaagtaacataacgtctctccaggagagttcaaatgttagggtgaaattctggaaagcttctatatatctatcagggtcatctgaacacttgcccagatctcccttaatttgctttaagtcttgtagggaaaagaggacttggaccttactgggcccaaattcactgggcatctgtaggaggggcaagagtgagactgggcttgtttgggatgaagatttctaggaggggccaggtgagaggctgaagctggatacggaggttggggtggacccagaggagcagggcttgagggagctggcacgtcagctgggggtgcgtctgggactcgtgtctttaattccctgggcttgaccctggcagccttccccgagacagcaaacaggagggctggaacaatcctacatgtcagcaaaggtctggattgctttgcaaggtatagaaagcctgcacatttggggcctcagaccatgtgtcctcacatccagagaaaagttctaattgcaggatggtattgaaatgaatggtcccttcctgaagccaagccagtccttcctgtaaaccataatttggccaaacctatgtgcggagggctatgagatgcttttcctctggattctgagggtcaaaacagtcccaatggttcaggatacactcaaggggagtacaagctgggggtggtgaggagaactggctgcccattctgaaagacagggaatagaggtgttcctcatttcccttccttcttttggcaaaaagctcagggtgtgatggggagggaaagcaagcatcttcacttcactttccacctcttacccctgcgccctggcaaccttggcaggtgccggccacaggtacaaatgcggtatgtacccatgaagcagggagaacctggagattaggaattaactgccctcacctatgtttccttttctccctgctgttgaaaaactttgagttccctgggcctttttatcccatgaggcatggcctccttctgtgggatggggttcagtcagcaggaattggtcctgtccatttacattgtgcctgttgcctggctttgaattcctcagacctgctttctctttctagggcctcagcctgaagcttggaattgagtttgggactgaaaaagcatttcagaggctgtttatatccatttagtgcctcaaataagccctgctgaatttgcaattatcagccagcaggggtcactcctctgttaacttccctattagaaacagagcggtggggattctcacttagaaaagaaaaaaagagaaaaacagttaaagaggcaaaaagtggggaatgctgggggaagaaccccttgcttagtgcaagtgggcccctctaatccttataactttcccatccttcccccagttcagaccaggttgaattccttggccatggaaggaaaggttccattgatgcagtgggtgagaagcactctgtagggtcctggctaccatcggttttctcacacccccctcatcccaggcagtggagggagacacttctgcgacattgctccccctgccccttcatggctattgggtgtggcctttgcctgctgcaggcatgcctaggtgctggagctgggagggaaaagggtaaggagaggtgccctggaagccgctcatgcctggggctgtcaaggtggaggcatacatggcacctctaggaaaaattggtctgatttgcacctttggcggctgagccaaatgctcattttacttagtaacattgcctcagcctgtagcaaaactcttaacattataaaggaagagataagatccatttcaaataatgtgtgagagagaaaagagatgaaaggaaaacagagtcttttacctgcaggaaagggagagaagtggcagagttttggaagaaaggcaggcccaacagtttcccattcactcacactcaccttccgagatcccagacgagccaccagttgaaatgggaaaagtttccttgtccccctcacaggaggtggagtgggggtgtggcttgcttctttagtactccgctgctcaaacctctagggaagcatacagactggcaagttgtggggctacaaccccatggcagcatctaggggtagatgtttacagctgctgaagccccagtggacatgtggtaccatgtgctcttttagttttgccatctataggtggctttgtggtaaccagctcaattagacccattccttaacccaaagacagagggctttctgtatcccgcggttgttacctaggtgtaccagaaaaatcaaatcacacgtggtcttggagaatgagtgcaaggttttattgagtggaagtagctctcagcagatgggggagccaaaagggagaatagttttcccctgaagtcgggttattcagcggcccaggctctcctctggctgccccagccaaactctatgtcaatccattggtcggtggcctgccagagtgctggtgcctgttggtggattcctctcagcgtcgagagtttttccctctcaggaaagggagagaagtggcagccacccatgtgttcttgcactgatgtgctcctctcgacgtccaacctcctgtgtgtctgcctgctagggtcccagagtttttttaggcacaggatagggcatggtgggccagggtgatcttgggaaatgcaacatttggtcaggaaaacaaaaatgcctgtcctcatctaggtccaggggcacaagcccaggtttggagccctagccagggaccccggcctcctctacccatcactttccttcaccttttctgtatcattcaaagggaccatgcccttcccttcccagcacttctcttctgtatcaataggtgatgtttttaaaatttcccaactctagtgcaggcatggtactagacatatacatagaaataaaaccacacttattcttctggctggcaagacatagtatttttgccaaattatgtgttgttttgaagcattttatgtacccctggtcatataaaaataaagctattttgttcagtacaaacagcagcattttctggattagaaagttaatcatcttaaaagatcatcacggatttttccattgcactcatcactaattgctttggcaaaaaatttcttatctcacgcatgacaaaatcagccgcagtatctcctagtaatttaatggtgatgatctttataaaggaaataagcacatcaagggaaaacataattttttttaaaaaaagagtaataaaactttttaaaagtcttttttaaaagactgcttttctaaaatagtaaaataaaactccaccaataaaaccaccaacaaaacagaaaagaaaaaataatgatatgatcggagctatttgatgaaagatggtaaattaaatttaaaatgattagaagagaaaaagcaatacctgtctcccgtaggtctcagtccaggttctgctatgcctttctcctggtgagccacctatttaagagtcgcttaaagcatatgttaatccaacaacagcagattaaaaaccaatgcaatctgaactatttgatctaaaaacataaataaaatttaaaacaaataaaagagaaaaagcagtacctgtgtcctgtaggtctcagtccaagatctgctctgactcccttgtggtgagttagccctttagaagtcacttggggtggggcatatgttaattccactaacattggttctggccaatgagtcaggaaggtggtaaatggcaccttttcttcttgctgatttctttcagttcctttggagtctggacattagtcctttgtcagatgcctagtttgtgactactgtttcctatactgtgggttgtgtgtttaccctgctgatatttcttctgccttgcagaagattttcggtttcattaggtcctattgatcttattctatttttatatttttgcgtttgcttttggggcattagtcatgactacttggcctaagccaatgtctagaaaagctttttggatgctatcttgtagcatttttagactttcaggtcttagatggaagtttttatatgctttgttaaagatcaggtgactgaaagtaccgggctttgtttctcggttctctattctgttccattgctctatgtgcctatttttatacttcctgcaccatttattgaataaagtgtcctttccccaattagtgtttttgcatactttgttgaagattagttgtctgtaagcatttggctttatttctgggttctctattctgttccattgctctatgtgcctatttttatacttcctgcaccatttattgaataaagtatcctttccccaattaatgtttttgtgtactttgttgaagattagttgtctgtaagcatttggctttatttctgggttctctattctgttctattgctctatgtgcatattttataccagtatcatgctattttggtgattgtagccttgtagtataatttaaagcctgccttcagatttgttctttttgcaaagtattgctttggatatgcggtcacgtttttggttttgtataaattttaggattcttttttctagttctgggaaggagaatgatgatattttgatgagaattctactgctctgtagatggctttggagagtatggtcactttcacaatattgattctacctattcataagcttataatgtgttcccatttgtttgtgtcaactgtgatttctttcagcactattttgtagttttccttgtaggaaacttacattaacctacttggttaagtatatttctaagtattttacttattaaaaattctcagggaaatgcaaagtaaaactgaggtgggaaattaaagaaaaataaaattaaaaagaaagggaaataagctttcttgtattaagctaacttgtcccagaggcagcaacaggcacagcccagacccaggaaaagtcttgataatattatttattgtattctggagactcttccagcactccttcaatgtagggagaagaaaaacaaattttcctttgttttatggtatgagtttatagattcttgttctctttaactagtaacttcaagtattctgttttatctaagaagtatggcaaaggtcatgagaagcctgagcaggcctgaactacagctctctaggcaccatagtgaagataaaccaatgcaagcctctttagagcaaaacctagataatagacatctgggttgcatagcaacagttatgtgcaatcctgagttatgaacctgttacaatttgattaactgtctttttcctgcctctgtatccctgctttcacaccactgtaagcttgcttcaagctggcccacccccttttgtgaagtgtgtataaaagtcaagtgctgtctttgttccaggccctgtctttggacgtgagtctgctgggcctgagagcactcaataaaagattctcctgttttaacccaaagcctctctctcatcctcctaaatcccacaacaaaaccacaatgagatgctatcttaatcttgctagaagcccataatttaaaagtcagaaaacaatagatgttggcatagatgtggtcaaaagggagcactttgacactgctagtgggaatttaaactagtccgaccactatggtaaacagtatggggattccttaaagaactaaaagtagaccattcattccagcaatcccattactggctatctacccaaaggaaaagaagttattccataaaaaagacacaagaatatggatgtttatagcagccgattcgcaattgcagtgatatgggaccaacttaagtgcccatcaacgaacgagtggataaagcaaatgtggtacaccatggaataatacttgataataaaaaggaacaaaataatgtcctttgcaacaagttggatggaactggaagccattattctaagtgaagtaactgaggaatggcaaatcaaatattgaatgttttcacttttaaatgagagttaagctatgagaatgcaaaggcataagaatgatataatggacttggggactcagggggaaaggttgggagggggatgaggaataaatgatgacatattgggtatattatacactgctcaggagacagatgcctcaaaatctcagaaattaccactaaggaacttttatccacataaccaaaaaccacatatattccacacactattgaaagaaacataaacattattttaaaaaataaagccacttttaaaattagcaaaataaaataaatatgtcttcagagtttagatattggatccaaattagacagatcaaatactgcctttactaaatattttcatgtcattaacaacttctaaaacctttcaaacagttttttgacatgtcttggaaccatccatttctagctaaggcctgggcacctgtgaaatagggccatgcccccccttatactgggaagagtaagatatttcaagactaagatgttttctacagctccatctttttctttaagctctacatcaaggacataattaaaattggttgtctcctaagtggtttactaaaaatgcatacttaagagttaccattataattaatatttgtatctaaagctacttaaaaattttcacacacaaatctgactgaacaagtaaaatatattttaagtcaaagtttataaaaggacatgagaacatagcttttatgaaaaaattagttttgtcaagtttagaggttttcaaatattttaaattcaggaaataaaataacaaaaagacaaaagaaaatggttgaacaacttagaaaaggtttgttaaaattcatcttataaaacaatctacatgtaaaaagtgggctaaaatttgaaagagattatttaggttttccataaattaatccagaaggggtaggaagtcttaagaatgaggaaggacaggaggaaggggaggtcatcctgacactgcagaggcagaagtgcagctgaaggtatgaaggctaagaggggaggggagtttgagtgctgctgcctggctgtcagagcagaggagggtcctgggcaccagacttgaggaagggatgaaaatgctgggcagacctgtagtgggcccttgagatggcagatagtggtttccagagagagggccattgttttccagtgcccagcactgagcagagagagttttgggcagtgtaaaaaaaaaaagagaacttacctctttctcgttttagaaaaagaacagtctaagaatatcagcagggaaactctcagtgcttcaaggggttaaacgcccttttggctttcttgtgttggtttcatcatagaggaggagaaacttcttggaagtgttcctaaaaacacaacacgtctgcttctcctttcaaaaaaggaagtgctaaaacacgaacactctagatccaaatattaatacggatgtctaaatgcttccgttttccaaggggcagaaagctaaaggttgtaacctattcatttcagtcaaagttggtgaaagggaagcaaaggaactgggtggggcttggaaggatgacgaagctcaagctcattggccagcaacctctctcctgggggcgggaggggtgagcatacgtcattgctttggcttctataaaatgaggaggactcaccgagtgtgaagagtccttctggtgattgcagctgagagcacactcacgacgttctgcaaggattctctgattatgattctgaagggaaaagcgatggaatggacagcagagattgtaattttctttatcttgaattacggaagaaagtatctaggacagaaatccacgacaagtccttggaaccagcagatctcttcgttcacggagacgttgacgtattctctattgaagaagattcttaccttcttactggacaaggttttgtcagttctgcgtgactggattgtccgggagactctgaggaaactgatgtcacatgtttttccaaagaagatgtttctggaaccaacaactgtgattgtggtttgaggacttctgagagttccagtacaggaaataagcagaacatcagctggaggctaaacggatccagacttcactcttcacttcccttcctattcagtctattgtgcctgctgactgagaagcttggctggtatgtgagcaaataaacggaactattcagaaggagatgttgacatattctgtattgaagaagatccttatcttctcacctgacaaggttttgtcagttctgtgtgactggattgtccggaagactctgaggaaactgatgtcacatgtttttccaaagaagatgtttctggaaccaacaactgtgattgtggtttgaggacgcctgggagttccggtatgcgaaataagcagaacatcagctggcggctgaagggatgcagcctccactcttcacttcccttgccattccatctattgtgtctgcctgactgagaagcttggctggtatgtgaggaaataaacggaattataaacaaggagattgtttctcatctacttcattctgttgtggcttttctattttggggttcagggtgtgtgacaaggaccaaggagatgaaaggtttcatgatggagaaagcccaggcaatcagattgaagagctatccacagggaatcttggctgctgaggggctgcaccctgcaacggactgaccatatgacagaaaagggttttaaaggctcaacttctggactgagaacccagagtaatttgggaacctcctctgtgaggagatatgaaagctgggaatcatgacatccctaggaatggaaggcacatttcctgatggaaggggtgctttggaaaacaggagcagagtagacacagcagccttgtggatacgggtgggcagcatgcatgggtgatgtgaacgtggagtgtttgtgatcgaaactcaaaatgtctgacaaagtgaaaacctagaaaccacaatgaggaggaagagtttgtgagggcaatcactctccccatgtgtgaaaatcgggggctcttaaaatctcatctggagaggtgcagtctaccaaactctgggactttagcctccccttttaaaaaaccgtgcatcaataccaacgtccgaaaccacagaaataacacctggcttgcatggagacaaggacaaaaagccgtcatgatgagttgttctgctcacttgctgcctctgttcagtgcacaggatattgtccacccactagcaggctactgcaagagaagtgtgcaatatgttccctatgtgccatatatgtgccatatggcccatatgacaactgagtcagaaaatatctgatgccctcagagttacactccacctggagcttgcccccagccatccaggacctaggctccctaccctgtccaattttctggtgttttgggggcttcattctctaaggtgtgcccactctttactcaaaccaaaacacccacatattcctgcccatgaacaaccaatcaaccacttctcagttccacatcctgctgttgggtctctagtggtgacactgtaactcccaggtcatagtggtgacactataacacctagctaaattgatgccttgtctctaggaggccatgggctcctgcaggtctcatctgactctctgtagccttccctgacaatgctcacaatacccaagccagagccacattgacagcaagctgctctcatcttacctttgccagacctggccactggaaaaggctgaccctcatcctgcaatgcctatacctccaacctttgtctcaagctggtgtcctggagggacttctaagcagaaaacagattcagactcccatcctctcctgaatggcctcatatccaattctcagaccctcagccttcattgtaaggacacttcatccatgcccttgagtattctgtctgcactgtgtattctgcaatagattctcctccctctgcgaccctcaactccttccgcagactttttgttttcttgatcatctaccatagtcttccactgggacactgccaagcccattctggagagtgagttgtgcaagtacactgccccccatctacctttcgggaggtgtatacacccttctttctcccaggtctggaggctttctattttcatcctgaggcatctccacctgctcttggattcttcaaattgacaaccaccagttaacaagaactatgtgtcaccaaatagccaaacaatggcaattacaaaaataaaattaatagctgtaacccccattagcaaggatacacaaatcaaatcagggatagtgggtgaggaagtctgcctaacattcaaggaaggattctgaagtgatacaaaatcattgcctttgctatctttagaatggacactttcagccaggcacagttgctcagcctgtaatcccagcactctgagagccccagttgggtggatcacttgaggccagcagcttgagaccaccctgggcaatgtgcagaaaccccaactctactaaaaatacaaaaatagccagttattgtggcacatgcctgtaatcccaactccttgggaggctgaggcacaagaatcacttgaatctgggagccagagtttgtaatgagcgaagatcatgccactgcactctagcctaggcattagagtgataatctgtctgtggaaaataaaaacattcctcttcaaagttttcttctttaaatcataaatgttggaattaatatatcctctttgaaactcactttcttcaagcttctttatttgatggtagtaaatctttgttaagctttatgaggcaagagtaatggaagaagcatattatatatatttatactctaacctcagtgcttgttctagcaagctcaggcatgcgtgaatgtgcccaggcatgttccagcccataccttatatcctttccttattgggaaatgctgttactcctataagcattcttgtaagcaacttcctctttttctttgtctccactatctttacctattgaggacagttttaggttcttagccagttggatgtagcatagactgtgaggtccaaccccagccaatggagatagcacacagcagtagcgacctcatgcttaacagataaatattcctgtctccctttgtttggggtgctctcagctgatgagcaacaccctttctaaagaaattaaagttgtcttgctgagaaaacttttggtctaaatgctgattcttccttgcagcactgaagaagaagcaattatttccaacactttctcatacacaaaaaaagaagaaggtggaagaaaactttcttgtgcaccctatccctcactcagaaagacaacagaaggctcctagtggcaagccctagaggattcatttcttttgggaaccctcttggctgggatactaggactcaggtcaaactcagcattttcagtgtgtgggaagtgtgcttgggtttcactgttacttccaataatgtgatttggtccttggggttcaccaaattttggtatggagtggtgaaccctgttaagtttaagtgtctataaaattaacaaagcaaaataaccattctgccccatggttcagagaccaaatattgtgtaggaaatgctttagcgagagaaacagagaagaataaaaaatgtcctcaagcgctgcattatttcttgttatcgtccagatcttagaggaaaggctttcattttccctcattcagtatgatattagctgtgcatctgtcatttatggcttttattatgttggggtatgttccctgtgtatgtagttttttcagggtttttgttatgaagtgatgttgaactttatcaaacgtttttcagtttcagttgaaacgatcatatgctttttgtccttcattctcttgatatgatgcatcatgttgatgatttccatatggtgcactgtccttgcatcctgggcatgaattccacttgatcatgacaaatgaatttttaatgcattcttgaattccgtttgctggtattttgttgaggatttttgcatcaatattcatcagagatattggcctgcagtttctttttttttcttttttctttgttttgttgtttgtttgtttgtttgttttgatgtgtctatgtctggttttggtatctgggtagtagtgttccatccccttttattttttagaataatttgaataagactggtgttggttctttaaatatttggtagaattccgaagtgaagtcattgggccccgggcttttctttagtggaaggctgtttattatggcttcaatctcgttacttattattggtctattcatgttttgaatttgttccttatttaatcttggtaggctgtgtgtatctaggaatttgtccatttcttttagattttcaaatttattggcacataattgcccattgtagcctctaatcgtcatttgagttcctgcagtaccaattataatgtctccttcttcatttttgattgtatttatttggatcctgcccctttttttcttacttaggctgcctaataatttcttaattttgttgaactttttcttttgtttgtctcgctctgccaccaggctggagtgtagtggtgtgatcttggctcactggaacctccgtctcccaggttcaagcaattctcctgcctcaccctcccaaatagctgggactacaggcaagtgccaccactcccagctaatttttgtatttttagtagacacgggttttcaccatgttggccaggatggtctcgatctcttgacttcataatccacctgcctcagcctcccaaagtgctgggattacaggcatgagccactgcgcccagcctaattttgtttaaattttcaagaaatcaacttcttctttcattgatttctgtattttttatttccattttatttatttaaactctaagctttattctatcttcttctcattttagctttggtatgcttattgcctctctagctctttaatgtgcattgttagattgtttatttgaagttcttcctctctacaccataagacgtaagcatgtcctcattatgtcataagatgtaaccacttacagctataaacttccttcttagttctgcttttgctgtatctcataggctttgttatgttgtgtttccattatcaattgtgtcagaaatttttcaatatttttcttaatttcttcattgagcaactgatcatttgggagcatatttttaaacttccatgtacttacatagtttccaaaatacctcttgtgatcaatttctagttttattccactatggttcaagaagatgcttgatattatttcaattttttttcacattttaagatgtgttttgtgacctaacatatggtctactttttttttttattaaactttaagttgtggggtacatgtgtagaccgtgcagttttgttacataggtatacacgtgccatggtggtttgctgctcccattaacctgtcatctacattaggtacttctcataatgctatccctcccctaacctccaccctctgacaggacctggtgtgtgatgttcccctccctgtgtccatgtgatctatttttgagaatgatccatgtggattagaatgctgtggaaaagactttggattcctaatatccagggagggagacgatgatattactttcaatatcacacgggtgtacacactctctgtgacattgttcctaatatccagtggaagagaggatgatataacacccagggagggagaggatgatattactcttaatattgcagggtgtgtacccatgcctatgatattgttcctaatatcaggagggggagaggatgatattactcagaatatggcagggggtgtacacacactctgtgacatggttcttaatatacaggggagaatgggacaatattactctcaatatcgcagggggcgtacaaccctgtgatttgttcctaatatacaaaaggggacagtatgatattgttcctaaaatcgcagaaggtgtacaacgccctgtgatattgttcctaatatccagggcgggagaggatgatattacccccaatatcacagggggtgtgcactttccctgttacattgttcctatgatccgagtggggggaaatgacattagtcccaatatcgcaggatgtgtacactactcccccatgatattgttcctaatatcaagggggagagaggaggatattactcccaatatcgcaagggaggtacatcctccatgcaatattgttcgtaatattcaggaggagagaggaagatattactctcaatatcgcagaaagtggacacccaccctgtgatgttcttcataatatccagggaagcagacgattatatgactttcaatatcgctgggagtgtacatcccttttgggatattgtttctaatatccaggaagggagaggattatattacttccagtattgcagccagtgtacacatttcttgtgatattgttcctaatatccagaaagggaaaggatgatattactcccaatattgcaggtggtgtacacccccctctgatattgttccttacatcaaggaaaagaaagaagaatattactcccaatatcgaagagagtgtacacccctcctgtgatattgtatttaatatccatggggaaagaggatgttgttactcccaatatcgcagggggtttacacccacactgtgatattgttcctaaaatccagtgaaggagaaaataatattgctcccaatattgcagggtgtatacaggccctcccccgttatattgctcctaatatccagcggtggagaggatattactttcaatttttgcagggagtgtgtaccccctctctgatatttttctaatatcaaggatgggaaaggatgccattactcccaatatcgcaggaggtgtacatgccctgtgatattgttcctaatatccagggaggtagaggatgatattactttcaatattgcaggggctgtacaccctctatgatgttgttattaatatttaggttgggagaaaatgatatttttcctaatatcctgggaaggaaaggatgatattactgtaaatattccagggagtgtacaccttcctaatattctaatattgttcctaatatccaggggtgggagaggattatattactcccaatatcgcagtgggtgtacacccctcctgtgatgttgtttctaatatccaagcgaggagaaaatgatatcactctcaataccgcagggggtgtacaccttccccatcatatcgttcctaatattcagagggaaagaagatgatgttactttcaatatcgcaggggttgtacacaacccctgtgatatttctcctaatatccaggaagaaagaggatgatattgctcccattatagcagacggtatacgcctccctgtaacattgtttctaatatcaagactgggagaggatgatatcacttccagtatcgcaaggggtgtacacctcccccgtgatattgttactaatatccagggggaagaggataatattactttcaatattgcaggggctgtacacccccgtgatattgttgttaatatttaggttgggagaaaatgatattagtccaaatatcgcagagagtgtacacacttccgataatattgttcttaatatccatgggggagacgatgatattacacccaatatcgcagggggtgtagtctccccttgtgatattgtccctaatattcagggaagtaaacgatgatgttagtgtgaatattccagggagtgtacaccccctttgtgatattgtcctaatatccgcaggagagaagataatattactcccaatatcgcagggggtgaacacaccccctgtgatattgtttctaatatccaagcgaggagaaaataatattactcccaatgtctcaggggatatacaccttccctatgatattgtttctaatattcaggtggaaaacgggtgatattactcctaatatccaggaagaaaggggattatgttactccccttatagcagggggtatacacctcccctgtaatattgttcctaatatcaaggctgggatatacgtggggggaaggatgatattactcccaatatcacaggggttataaaaccttctgtgatattgctcctaataaccatggcggaagaagatgatattactcctaatattgcaggaggtgtacactcccccattatgttgttcctagtatgcagaaaaggagaggatgacattattgccaatatcgcagggtgtgtacaccacccatgatattgttcctaatatttagagggacagaggatgatattactcccaatatcgcagggggtgtacacgcatcccctgtgatattgttcttgaaatcgaggggaaagagaattatatttctctaaatattgcagagggtgtacaccgccccctgtgatattgttcctaatagccgggggcggggggagataattaaattactttcaatatctcagagagtgtacatcccccttgtgacattgttcctaatatccagagcaaaagagaatgatattcctcccagtatcgcaggaagtgtacatttaacctgtaatattgtttctaatatccagggggaagagaatagtaatactcccaatatcgtaggggttgtacaccttttctgtgatattgttgcaaatatttagaagagagagagaatattactcgcaatatcacagggaatgtatacttcccctgtgatattgttctaatatctagaaaaagagaggataatattactcctaatattgcagggggtgtacacccccacttgtgatattgttcctaatataaaggaaggtcgaaaaacaaacggggagcccagggggaaggaaggcaggcgaggaagaggcagcgccggggcgccggagggagcagccgggccgcggaagcgcgagcacgagaccggtcgcggtcgcagtcgcatttttgccgttgtcgcggccgccgccgccgaggcttacccggggatgtctgagcccgcgcctcgcggcccccaagctccacgctgcgcccgctgtcccggcctctaagggccgccacgtccctgcggcgcgcgcaggcagaaagcggcttcgtgccggcggagggggcccgggcgggccgggaaaggctgccccaggccccgcgcctaccccatcaccgcggccggcgccgggccgggaggatgagcggtgtggggctctgaagcatggagggggttttgtacaagtggaccaactatctcacaggttggcagcctcgttggtttgttttagataatggaatcttatcctattatgattcacaagatgatgtttgcaaagggagcaaaggaagcataaagatggcagtttgtgaaattaaaggtgacagctttggaggggaccacccttgattggatacataaattctgttcattcagcagacaacacaagaatggaattaatcattcctggagagcagcatttctacatgaaggcagtgaacgcagctgaaagacagaggtggctggtcgctctggggagctccaaagcatgtttgactgatacaaggactaaaaacgaaaaagaaagaagtgaaaccagtgaatcgctgaaaaccaaaatgtctgaacttcgcctctactgtgacctcttaatgcagcaagttcatacgatacaggaatttgttcaccacgatgagaatcattcatctcctagtgcagagaacatcaatgaagcctcttctctgcttagtgccacgtgtaacacgttcatcacaacgcttgaggaatgtgtgaagatagccaatgccaggtttaaacctgagatgtttcaacggcaccatccggatcccttagtttctcctgtgtcaccttctcctgttcaaatgaggaagcgttctgtcagccaccctggttcttgcaccagggaggagtagccactgtataaaagaaccagtatctgcacttcaccgactctcccagcgacgccgaagaacctactcagatacagattcttgtagtgatattcctcttgaagacccagatagacctgttcactgttcaaaaaatacacttaatggagatttggcatcagcaaccattcctgaagaaagcagacttatggccaaaaaacaatctgaatcagaagatactcttccatccttctcttcctgaagaaactgtagtgtccaactttctctaagtattgctatgcaaaagctgctgtaattgaactattgttatagggagtagttttttcccttaggactctgcactttatagaatattgtaaaacagacaaacaagaaaacaaaccacatacttttgaagcgtgttttatctttatatagtttgtttgcaagagtattttcctaataacttcacagtatgaatgtgcatcttttttttctttttttaacaaatgatggtgtaacattttgacatccataaggacaaatgtagatatttttctaaaaaaccgtgaggggactgacagcttggtcagggtgtattgtagcttataaacatgaaatcttacaaggtttcagtttgacagaagtgtgatatatgtaacttgtgccatggaccaaatggtcactttaccacagctaaaaatgagttatgatagcagcttgatggtgattgcattgtattcctttaatcaaaaaggaaacgcaatattctaagtatctttagcccaaataccatgacatattgagcatctttaaataaccagactgtattgtccttcatatgtgaagttgacactactgatttgtcaataccaaattttgggttaaagtgtttaatttttatttatttattttcttgttgcctcaaaagatgattgcattctaacttttgtgacctaccaaatttaagatgtgtatacattgttctttacgttgttctagaaaagagattttaatgctgtagtgacttagctcacttacatcagagaaataaacaactttcaatggaaaaaaatatatataaaggaaggaagaggatgatattacttctcatatagaaggggttgtacaccccccttgtgatattgttcctaatattcagggagggagaggattatattactcccaatatagcagggagtgtacacccccccccccgtgataatgttcctaatattcagggaagcagaggatgatattactttcaatatcacagggggtgtgctgtccccctgttatattgttcttaatattcaggggggagaggatattattatgcccgatatcacaggagaagtacaccccacaagtgatattgttcctaatatccaggggtaaagaggatgatatcgcaggtggtgtacacccctccccgtgatattgtttctaatataaagaaggagagagcatgatattactcccaatatcgctggaggtctacaccccccttgtgatactgttcctaatatccaggaagggaaacaatgatattgctgtgaatattccagggggtgtacacccctttgtaatattgttcctcatatccagggggtagagaggatgatattactcccaatatcgcagggggtgcacggccccactgtgatattgtttttcatatccaggaggggagaggatgacattactctcaatatggcagggggcgaacaccccctgtgatattgtgctagttaggttgggagaaaatgatattactcccaatatcgcagggggtgtacaccgctcctgtgatattgttcctaatatccatgacgggagaggatattactcccaatatcgcagggggtgtacctctcccctgtgggattgttcacagtatccaaaagggaagaggatgatgttactcccaatatcacagggagtgtacaccaccattgtgatattgttcctaatagccagggaagaaaacgatgatattattgtgaatattacagggggtgtacacaccccctgtgatatggtttttaatatacaggttggaaaaggatgatattactcccaatatcacaaaaggtgtacacacccccccatgatattgttcttaatacttcggtggggagaaaatgatattagtctccatatcacaggggtgtgaactcctccggtgatattgtttttaatatcaagaggggaggagatgatattgctttcaatatcgctgggggtgtacatccctcctgtgatattgttccttatatccaggcgaggggaaaataatattactcccaatagtacacaccccatgtggtattgttcctaatactcagggggaaagaagataatattactttcaatatcacagggtttgtacacctttcctgtggtatagttttcaatatccagggggaaggtacatgatattactcccattgcagcaaggggtgtacacacctcctgtgatattgttcctaatatccagaagtggtgaggatgatattactcccagggggtgtacaccccacctatgatattgtttctaatatccaggggaaaagagtgtgatattatgcccaatatcgcagagggtgtacacttatcctgggatattgtttctagtatttggggagggaggagaggatgctattattctcaatatcgcagaaattgtacacccccgctgtgatattcttcataataatcagggaaaaagaggatgatattactaccaatattgcagggggttacacttcccctttggtagtgttcctaatatccaggaagaaagaggatgatattaatcccattttccaggaagtgtacacccaccgtgtcatgttgttcctaatatccagcagggaagaggatgatattactcccaatatcggagagggtgtacacttcccctgttatattgtttctaatacccagggggaagaaggatgacattactgccaatatcacagggtgtgtaccccaccctgctattgttcctaatattcaaaaggaaagatgaaaatattactcccaatatctcagggtgtgtacacctctcctgtgatatcgttcctaatatccacaggaagagagaatattactctcaatattgcaggggggtgtacacccccctgtgatattgttccaaatattcgggcggggagaggatgatattagtcccaatatcgcagggggtgtgcaccaacctgtgatattgttcctaatatccatgcgggggaggacgatatcactctcaatgtcgcaggaagtgtacacctctcttgttatatttttcttaatatccaggagggaaaagatgatattactgccaatatcgcagggtgtgtccaccccccttttatattgttcctaatatccaatggaaaagaggatgacattgctctccatatcccagaaggtgtacaacgcccctgtaatattgttcctaatattttgggggaagagaggatgatataacttataatatcacaggaggtgtacaccacccctatgtattgttcctaatatcctttaagggagaggatgatattactcccaatatctcaggtggtgcctattccccctgtgatattgtttttaatatccaggggaagagagtatgatattacgcccaatatcgcagggggcatacaccctctctgagatattgttcataatatatagagggagagaggatgatattacttccaatatcagaggtggggtacaccccccggttatattattcttgatatccaggaggggagaggttgatattactggatatatagcagggagtgttcacatcttctgtgatactgttcctaatatccagaaaagtagaggatgatattactcccaatatcgcagaacgtgtacacctccctgtgatattgatcctaacattcaaaggggagaggatgatattactcaaaacatcacagggcatgtacactcccctgtgatattgttcctagtatccagaagggagcaagataatattactttcaatatcgcagggggtgtacacccctctttggtatgtttcctaatatccagaaggaaagagggtgctattactttccatattgcaaggggtgtacacccccctgtggtatggttcataatatccagggagggaaagggtgctattattccccatatcgcgaggcatgtacaccctgctgcggtacggttcctaatatccagggggaaagaggatgctattacttcccatatcgcggggtgtgtacacccccgtgtggtatgttttgtaatctccgggaacgaagagggtgttattacccctcatatcgctggaaatgtacactcccctgtggtacggttcacaatatccaggggattgagggtgctattactccccatatcgcggggggagtgcacctccctgtggtatggttcgaaatatccagggtaagagagggtgctattattccccattttgcaggaggcgtacacccctctatggtatgttttgtaatatcccaggtaaggggtgctattgagagaagagagcaaaagaccccccccatattgttctgtattattttatactcagtacctgttttaagaagaaacaaggaagcgaaaccaaaggcaggcagcccggcgccaggcaccagatccaaaaccagacccgaaaccaggcctgggccttcctgaccttagcctgaaagttaaaattcaacccatgacctagcaactgatgttatccatagattccagacattgtatggaaggacattgtgaaatttcttgttctgttctgtttcactctgagtactggtgcatgcagcccttgtcacatacccactagattgctcaatcaatcatggccctttcatgtaaaaaccttagtgttgtgagcccttaaaaaggacagaaattgtgcactcaacaagcttggattttgatactctagtctgctgatgcttccagctgattaaaagccacttccttcactacctcggtgtctgtgggattttgtccgcggctcctcctgctacactgtgactccccttatagagaggggtgtacacccccctttggttcctaatatccagcgggggagtaggtgctattactccccatattgcggggagtgtacacccccttgtagtacggatcgtaaaatcaaggagggagagaaggtgtaattatccccatatcacagggagtgtacacccctttgtggtatagtttgtaatatccacgacgggagagaatgctattactccccatatcgtggagggtgtacaccgccctgtagtatggttcgtaatatccggaaggggagaggttgctattactccccatatggtgggaagtgtacacccccatgtgatatggttcataatatccaggggggtagaggatgatattacccacaatatcatagaaggtgcacacccttttgtgatattgtccataaaatccagaaggggagaggatgatattacttccaatatcacagggggtgtgtagccccatatgatattgtttgtaatatcaaggtagggagaggatgctattccttacaatagctcaaggggtgtaaccttcttgtgatattgtttgtaatatccagaaggggagaagataatttttttattttaaaagtaaactttaatgtcaaaaatgcaaacttgagaagggcagaaagatcaaacagaaggctgccacttcacaattggagggttgcacagtggccgggcagaggcgctcctcactccccagacggtgaggcagccgggcagaggtgctcctcacttccgagatgttgcaggagccgggcagaggtgctcctcacttcccagaacagggggctgccgggcagaggtgctcctcactgcccagacggtttgcaggcctggcagaggcactcctcacttcccaaacggagcagcggcaagccagaggcgctccacacttcccagatggtggggcagccgggcagaggcgatcctcacttctcagagggtagggcggcccagcagaggcgctcctcacttcccacatggtggggcggcaggctagaggcgatcctcacttcccagacggtggtgtggccatgcagaggtgctcctcacttcccagatggtgtggccgccgagctgaggcactcctcacttccctgacagtggggcggctgggcagaggcgctcctcacttcccagacacttggactccgggcagagactctcctcatttcccagatggtggggctgccgggcagaggcgctcctcacttcccagacggttcagaggccgggcagaggcgctctggggagaggataatgttactcccaatatcgcagggggtgcacactccctgtgatattgttccgaatatccagagggggaaaggatgatatagctcccaaaatcgtggggagtgtacacccccctgtgatcttgtttgtaataccaagaagaaaagagaatgctattatttccaatatagcagggggagtacaaccccctgtgatattgttcgtaatatctagggggagagaaaattatattagtcttaatatctcaggggacgttcatccccctgtaatattgttggtaatattcagaatggagaagatgatattgttcttaaaatacaggaaaaaatatgataatattacttccaatatcgaagggggtgtacactctcctgtgatattgttcccaatatccagaatgaaagaggatgctattactcccaatatcccagggagtgtacacccctttgccatattgttcataatatccaggggaagacaggataacattactcccaatatcaccgggggtgtccacccactagtgatatttattgttcatcatatccagaaaaggagaggatgatattactcccaatattgcaggtggtgtacggtccctgtgatattctttgaaatatctagaaaaggagaggatgatatcactccgagtatcacagggggtgtacacccccctgtgatattgttcgtaatatccaggggagaaaaggatgatataattgccaatatttcaggggatgtgcacctccctgtgatattgtttgtaatatccaggggtggagaggatgatattactcaaaataacgtaaacatcctgtgtgtacatcccctgtgatattgtttataatatccaggggggtagaagatgacattacccccaatatcacagagtgtacacacccctgggatactgttcataatatccaggcgggaaagaatgaactacttccaatatcgcaggatatgtacacccccctgtgatatatttcctaatatttatgtgggtaaggatattacccccaatatcacagaaggtgtacatcctctttgtgatattattcctaacatccaggaaaggagagaatgatattactcccagtatcgcagggggtgtacaccacccctgtgatattgttgctaatatccagggggagaggataatattactcccaaaatcacaggggacgtacactcctcctgagatattgttcctaatattcatggggaaaagaatgctactactccaaatacagcagagggtgtacaccatccccgtgatattgttttttatatccaaagggtgaaaggctgatattactcccaatatcgcagggggtgtacaggccccccatgatatcattcttaatatccagggaggcaaagaatgatgttactcccaatattgcaggctgtatacaccccccgtgatattgttcctaatatccagagtaagagaggatgacattgctcccaatattgcaggggttgcacgcacgccctgtgataatattactcccaatatcaacagtgggtgtacactcctcctgtgatattgtttgttatatctaagaaagaagaggatgatattactgtcaatatcacagaaggtgtacagccccttgtgatgttgtttctaatatccagcggtgagaggatggtattactcgcaatattgtagggggtgtccaacggccctgtgatattgtttctcatattcaaaaaggaaaagaataatataactccaaatatcgcagggtgtgtacacttccctgtgatattgatcctaatatccaggaagagagaggatgatattaatcccaatatcacagggggtgtacatcgcttctgtgatattcttcctaatatccagggggggaggggatgctattactcttaaaatcgcagggaacttacactcccactatgatatttttcctaatatccaggaagggagaaaatgatattactcctaatatcacatatcacaatgggtgtacatctccccgtgatattgtttctaatatcaaggatgggagaaaattatattactctcaatatcgcagggggtgtgcacacctcctgtgatattgttcctagtatccagcggaggagatgatattactttaaatattgtagaaggtgtacaacccccctttgatattgttcctaatatccagggggaaaggagatgatattactcctaatatcgcaggggctgtacaaccctatgtgatattgtttcttctaatatccaggggtggagaagataatattactcctaaaatcgaaggggacatacactccccctgtgatatttttcctaatatccagaaggaaagaggatgatattactcctaatattacaagaaatgtatacctgtcctgtgatattgttcctaatatccagaggggtaaatgattatattactcccaatatcgcaggggtgtacaccttccctgagatattgtttctaatatgcagtggaggagaggatggtattactcccaacatcacaggagatgtaaactccccttgtgatattcttcctaatgttcaggacgaaggagggtaatattactcactgtattgcagcagggggtgtagagccccctgtgatattgtttttaatattcaaggttggagaaaataatattccttccaatatcgcatggggtgtacacccttctttttatatagtttctaatatctggggggagaggatgatattactcccaatatcgcagggggattacacccccactgtgatattgtttttaatatccagggtgggagaggataatattactccaaatatcccagggctatacaccctccgtgtgatattgtttctaatatccagaggaagagaagatgatattactcccaatgtcacagggtgtgtacaggccttctttgatattgttcttaatatccatgagggagaggatgatattactcccaatatcgcaaagactgtacaccctttctgtgatattgcttccaatatccagggagggagaggatattacactcaggatcacagggggtgtacaccccaacctgtgatattgtttctaatatctagggaaaatgagggtgatattactatcaatatcacaggaggtgtacactcccttatgatattgttcctaatatccaggagaatgacaggataatattactcccaatatcgcgggtggtgtctccccccactccgtgatattgttcctaatacccagagggggagagaatcatattactcccaatatcgcaggggatgtacacctacatccggcggagtagaagataatattactcacaatatcgcaagaagtgttcaccttccctgttatattgttgctaatatccagggagtgagaagatgatattactttcaatactgagcgtgtacactacccctgtgatattgtttctcatatccagtagaggagaaaatcatgttactcccaatattgcaggggtgaacacctcctttgtgatatttttcctaatatcaggaaagggagagtatgatattacccttaatattgacaggggtgtacacccccctttgatattgttccaatatccaggggggcagaggataatattattcccaatatcgcagagggtgtacaccccccgtgatattgttcctaatatccagagaaataaaaaatagtattatttccaatatcacagggcgtacattttccctgtaattttgttcctaatatctggggggtggggtggcaggataatattactctcaatattggagagggtgtacacccccctgtgatattgttcctaatattcagggtgggagagaatgatgttactcccaatatctcaggagtcgtatacacccccttgtgatattttttctaatatccaggaggcagaggatgatattgctcccaatatcgcagggggtatacacccgagctgtgatattgtttctaatatgcaatatgggggaaggatgattttactttcaatatcgcagggaatgtacactttccttgtgattttgttcctaatatccaggggtggagaagatgctattactatattactcctcatatcgcaggcggtgtacaactccctgtgatatggttcagaatatccagagtgaaaaaggagggtgacattactcccaatatcgggggggtgtacacccctttgtgatgtggttggtaatatccaggggggcagatgagggtgatatcactccccatatcgtggaaggcgtccacttttttgtgatgtggttctttatatcccgaggggagaaggtgatattactccccatatcgcgaagggcatacacccccctgtgatatagctcataatattccggagagtggaggaagatactatgccctatatcgcgggtggcctacaaccccctatggtttggcttataatatccaggggggagagggtaatattgctccccatattgtggagacgtacagccccctgtgatatggtttgtaatatctttggggggcgagggtgatattactccccatatcgcggggagcatacacccccgtgatctggttcatagtatctcaaaggaagaagttgatgtgtacaacttaagggaaaaagttgaagtgaagtgtacacacgccctgtgacgtggttcataatatccaggcgggggagaggagagtgatatttactccccatatcgcgggtgttgtaaactcccctgtgatatagttcataatatccaggggagagaggagggtgatattgctcctcatatcgcgaagggtgtacaaccccctgtgatatggttcataatatccagaagggtagaggacgatgatattactccacatatcttgggaggtgtgatatggttcgtaatatccagcgatgagagaatgatattactccccatatcgcaaaaggtgtgatagggtttgtaatatcctgagggggagagggtgatattaatccctatattgcagaaggactacaccctcccatgacatggtttgtaatatcccagggggtagagtgtgatattactttccatatcacagggggtgtgatatgattcgtaatattcgaagggggagagggtgacactactctccatatcacggggtgtgtgatatggttcttaatatcccaggggttagaggttgatattaccccctttttggggggtgtgtacaccccctgtgatatggttcgtaatatcccgggggagacagggtgacattattccccatatcgaggggatcgtacaccccctgtggtgtggttcataatatccctagggggagatggtgatattactccccatatcagggggcgtgcactcttctgtggtataattagtaatatccagggggcagaggtcgatattcgtttccatatcatgaagggagtacacttccctgtgatatggttcctaatatccaggggggagagggtgatattattccccatattgcggggggacatacaacccctgtgatatggttcataataaccagaaaagaagagggtgatattaatccccgtattgcagagggcatacaccccccctgtgatatggtttgtaatatctaggggaggaaaaggtgatattactttccatattgctgggtgcagacacccctttatgatatggttcataatatccaagttggagagggtgatattacttcccatatcatgggaggtatacccttccctgtgatatggttcgtaatatccagaaggggagagattgatattactccccatattgtggggggcgtacaccttcctgtgatacggtttgtaatatctaggggatatagtgggtgatattactcaccatatcacgggggttgtaacatggtttgtaatatccaggggaggagagggtaatgttactccccatatctcggggcatgtacaccctcctgtgacatggttcgtaatatccaggtcgggagagggtgatattactcctcatattgccgggggtgtgttatggttcataatatcctggggaaggaggctgctatcactctccacatcttgggggatgtacactctcctgtgatatggttcataatatccagggtgggtgagggtaatattactccccatatcgcgggaagtgtacatacccctgtaatattgtttgtaatagaagagagggtgatattactccccacatcgcgggtggtgcccacccccctgtgatatggtttggaatatccagggggatgaggagggtgatattactccccatatctcggtgggagtacatccctctttgatcaagttcataatatccaaaaggaaacaggagagtgatattactccccatatcgccgggggtgtacacgggagggggagtacacccccggcgatatggtctgtaatatccagggaaggagaggagggtgatattactcaccatatcgcaggtggtctacatttacctgtgaaacagtttgtaatatccagggggggaaatgagaatgattttttttttttgagtctcactgtgtcacccaggttggagtgcagtggcacgatcttggctcactgcaacccccgcctcctggactcaagcaattctcctctcccagcctcctgaatagctgggactacaggcgcaccccacaacgtctggctaatttttgtatttttattagagacggggtttcaccatattggccaggctgatctcgaactcctgaccctgtgatccatccgcctcggcctccaaaagtgctgagattacagatgtgagccaccacgcatggcccaaggagaacgatattactccccatatcccagggggtgtatatccccctgtgatatggttcagaatatccggaaggaaagacagggatattacttcccatatcgcaaggggtgtgacatggttcgtaatatcccatgggggagagggtaatattactcttcgtattgtgaagggcatacactcccctgtgatacagttcataatattccggggagtagaggaagatattatgctccatatcgcgggtggcataagccccctgtggtttggttcataatatccagggaggagagggtaatattactccccatattgtggggacgtacaccctcctgtgatatggtttgtaatatcccagaggggagagagtgatattactccccatattgcagggacatacacccccctgtgatatggttcaaaatgtcttttttttttgaaggactggttctttatttcaaaaagacacttgtcaatattcattatcaaaacagttgcactattgatttctctttctcccaatcggccccaagtagaccacatcaaaggagagtacatattaagccaataagctgtaggatgtacacctaacagacctcctagaaaccttaccagaaaatggggacagggtagggaaagaaactttaaaagatcaacaaactgccagcccacggactgcaggggctgtcacagccagatggggtggccagggtgccacaaacccaaagaagcaaagtttcaaaataatataaaatttaaaaagttttgtacataagctattcaagatttctccagcactgactgatacaaagcacaatgagatggcacttgtagagacagcagcttcaaactcagaaaagggtaatgagatgagtttcacatggctaaatcagtggcaaaaacacaatcttctttctttctttctttctttcaaggaggcaagaaaagcaattaagtgctcacctcaacataaggggaacatgatccattctgtaagcagttgggagggggtagagatggaacaaaattttggtctcagaggtcttgccatcttaatttggtcacttctaatgaaaaaaataaaaaatagaaataacattatccaaaggtatcttaaagctgaaaacttgaacagcacattttttgttgttgttgtttggctaactcctcctggaaccacctttctggcttagctagtactttgtacagagcaatgaggcttcccatagtggagtctccctgggctctgtttggctctcagcaaggcaggcctataccttttcctctcctccatggagagaggaatatgcattaaggtgaaaaatcaccttccaaaagtgagaaagggattcgatcgctgcttcagggctgtggtattatatggaatgttttacaaaaggttgctacaaaacaacaaaagaggtaattacaaaatgtgtacatcacaacatactttttaaagacattatgcattgtgctcacattcccttaaatgttgtttccaaaggtgctcagcctctagcccagctggaatctccgggaagaggcggacagtttggtgaaaaagacacagggaaggagcgggcggcggaaggagggggcggcgaaaggagaaagcagccttccagttaaagatcagccctcaattaaaggtcagcttcgggcaggctggcctcaggcggagtctggttcagagggaggagcagcagcagggtgagactgaggcgttctacatctcattcaggtcaagcagagtctggtccagcatcctttgtgtacagaggtgctcccctttggtgcatttcagtttatcttccaagtcatcaattgtcttttccagcttggctaccgatctctcagcaaactcagcatgggtctccgcctcctttattttatcagtaagaatcttgatctcttcctcatatttgtcttctttttgagagtacttttcttcagcagcactcagacacttcaggttctggtccatcagtctaatctgctcatccatctctcggcaaagggattctgccagctcagctcgttcctctgtgcgttccaagtctccttcaatgatcaccaacttacgagccacctcttcatacttcctatctgcctcttctgcaatgtgcttagcttctctgagttggatttcctggagttccatcttttcttcatcttttaaggcccggttttcaataaccttcttacctctctcactctcatcagcagctttttccgcttcttccagcttttgcagggcagtagccaggtgctcctgagcacggtccagctcctcttcaaccagctggatcccacgttcaaggaggccacctcagcctcagcctgttcccgggcccacctttctccctcaacttctcgctggaggcgctcagctcgctcctctgcatcatctgcctgctgctgcagaacctggatcttgcgcttcaccgcctcgatggtggtgatcccagccatggtgcccacccagctactgctagagctccggttcctgcctcctccgatcggcgttgcagcctcctctcacccttacttccgcctcggttcaaaatatcttaagggaaggagttgatattactccccacatcacgggaagtttacatcccctggtgatatggtttgtaatatcccagggtggatagggtgatattactctccatatcgcgaaggagtactcccccctgtgatatggttcataatatccttggggggagagtgtgatattactccccatatcgcgagggccatatactcctttgtgacatggttcgaaatatcccggtgggggagggggtagagggtaatattactccccatacagcgaagagcatacgcccttctgtggcaaggttagtaatacttcagggaaaagagtgcaatattacttttcatattgcagggaacatacactcccctgtgacatggttcgtaatatcccgggggctgagagggtgatatttctccccatatcaccgggggcctacacctgggtgtgatatggctcataatatacagggagggagagggtgatattactccacataccgagtgaggggttacacaccctcgtgacatgttcgaaataccccaaggaggagacaatgatattactttccctgtcgcgggggctacaccctcccagtgatatggttcacaatatcccggggtggagagggtgatattactccctatatcaccggggggtgtacacttccctgggaaatggtttacagtatccccggggggagagggtactattactccccatatcacgttacatatcagggtacacccccacgtgatatggtttgtaacatcccaggaggaagaaaatgatattactccccatatcgcggtggcatacacccctccccgttaaatggttcataatatcttggggtggagagggtgatattactccccatatcacgtggggcatacaccccactatgatatggttcataatatcccggaggggagagggagatattactctccatgtcgcggggggcatatacacccctgtgatatggtttgtgatatcccgggggcggagagggagatattactctccatatcgtggggtcgtacacttttctgtgatatgattcgtaatatccagacggggagagggtgatattacttcccatattgcgggggcgtacacccctctgtgatatggttcataatatcccgaagaaaagagggtgatattactcctcatatcgcggggaacacacaccaccctgtgatatggtttgtaatattcagcgggggagagagtaatattactccctgtatctcggatggcgtacactcccctgtgatatggttcataatatccagaagaaaagagggtgatattactccccatattccagggaatgtacaccaccctttgaatatggttcgtaatatccaggaggggagagggtaatattgctcccaatatcgaaggaggtgttatacggttagtaatatccagagaaggagagggtgacattactccccacatcgtggtgggtgtgcacccacctgtgatatggttcataatattcaggttaagagaggtgatattgctttccatatcgccaagggtgtacactcccgtgaaatacagttcgtaatatccaaaaggggagagggtgatattactcccatatcgtggggggtgtacacccctctgtgatatggttcataatatccagggtggaataaggtggtattactccctgtatctcggggcatgtacatcgcctgtgatatgattcataatatccagaagaagagagggtgatattaatctccatattgctgggggtgtacaaccccctgttgtatggtttgttacactgagttggggagagggttacattactctcaatatcgagtggggcatacacacttatgtgatatggttcataatatcccagggaggagagggtgatattactccccatatcgcgggaggcatacaccccaatgtgatatggtttgtaatatctacatttttttttttgagacgaagtctcgctcttgtcccccaggctggagtatgatggccggatctcggctcactgcaacctcagcctcccgggttcaagcgattctcctgccttggtcccccaagaagttgggattacaggcgcacaccaccacgcccggctactttttgtatttttagtagagaaggggtttcaccatgttggccaggctggtctagaactcctgacctcagatgatccacctgcctcggcctcccaaagtgctgggattacaggcgtgagccactgcacctggcctggtttgtaatatctatgaagggggaaggtgatattactttccatatcacgggaggcgtacaccacgatgtgatatggtttgtaatatccagggggtatactgggtgatattactccccatatcgcggggagtgtatacccttttgtgatatggttcctaatattaagctgaggagaaggtaatattactccccatatcgcaggggtttttatatggttcataatattcaggaagagagagggtgacattactctccatatcacggggtgtgtactcccccatgtgatatggtttgtaatatccagggaaggagaggttaatattactccccatatcgcagggggtgtacacctctctgtggtttgtaatatccaaagggaagaggatgatattatcttcaatatcttggggggatacagtccccagtgatattgttcataatatccagagggggaggggatgatattactcccaatattgcaggtggtgtacaaccccctgtgatattctttataatatagagggggatgatgatattactcccaatatagtaaacaacctgtgtgtacaccccctgtgatattgtttataatatccaagggtggaaaggatgatattactcctcatatcgcagggggtgtatacccctctgtgacattgttcctaatattcaggggaggagaagatgatactactcctcatatcacaggggatgtacacccccctgtgatacttttggtaatatccaggggaggagaaaattatattattccccatgtcacagagggtgtacaccccgctgtgatagtgttcataatatccaggtgaaaagaggatgatattactccgaatatctcaggaagtgtacacccttctgtgatattgttcataatatccaaaggtggagaggaggatactactccccatatcgcagtgggtgtacacccccctgtgatatggttcataatatccaatgtaggagaggatgatattactttccatatcgcggagagtgtacatccccctgttatattgtttgtaatattcagggagaaagaggatactactactccccatatcacacggggtgtatattcccctgtgatatggttcctgatatccaagagatattataatcctctcttggattatgctacctctcatatcgcatggggtgtacacacactttgtgatatcgtttgtcatatccaaggagggagaggattatattaatcccaagatcacggggggtgtacaccctcctgtgatattgtttgtaatattaaggggggagaggataatattactcccaatataattaacaccctgtgtgtactcctccttgtaatattgttcataatatccaatgggggagacgatgatattactttcaatatcgcagaggatgtacatccctttgtaacaatgtttgtaatataaaaggcaagagaggatgatactacttccaaaattgcaggacatgtacaccccccggtgatattgttcctaatatccagtggggaagaggatgatagtagtcccaatatcgcaaagggtgtacacaccccctgggatattgttcctaatataaaaggaggagaggatgctattattcccaatatcacagaaggtgtaaaatcccctgtgatattgttcgtaatattcaggaggggagaggattatattactcccaatatcacagggtgtgtacacagggaggggcaagggccagaagcgggcgggaatccccatgtttgggcggacccagtttctaatggccagcatttgccaatcaaagcttaccagagaactctaaaagccagggctttcctgctagacaagactcatttctggaactgctttaaaaagaaacaaaacttcccaaggaccccttttcctctctgtctgcctaaaataatgttttaaaaactcctaaagcagctgaattcagcccccttcctgggggaatgtatagacggaactcccacctttcccggcatcccaaggccagagtatgtgaaactcctgggtctctatgtgtgtctgagcggctgctctgccaacactccacacagccctgtgtcctggacccaaggcccttatgacctgagctcaagaggggatctcctgatccatgggttgcaaagatccatgggagaagcatggtttctggggcggggtcacacgctcagtcactgtttccctcggatgccggagatggttcctttggctctctgccaatacagggtgaatcatcatccatccctcttttctttgttctcccgggtcaagttgtttgcctagtcagtcccaatgtgagaacctgaatatttcagttgacgcgctgacttcaaaatccccgggcttcgggaggcggagcttgcagtgagccgagatcccgccactgcactccagcctgggcgacagagcgagactccgtctcaaaaaaaaaaaaaaaaaaaaaaaaaaaaaagtccccgggcttttcttttcactcagtggaaggcagctgcttctaattggccatcttggcccgcccccaccacgtgaccttctgtaaaatgcctccactctccaggaacgctctcattatataactttgcctgaaaccaacagcacgctcattgcacatatcatgggctcatttatttcacttataaagaacctggccaaggaagagatagtgcctaaagtggccagtattctgaccgatatgttagaaaaatggtgtgccgaccaattcatgacatgtgtcccaaaactagcaacggaaattgtattcgccgtgttgaggtctctaatccagatgatgctcatctatgtactggaaaaggcagagtcctttcctgacaagctgctgaaactcttcagaaacatctcatatttcctgaagaagatgatgtctggacaagcagcacaggtcgttcagatttaactttctattcatatatccagcacgatattcgcacaattgtcacgaaaccttaccagttgatgagtcctgcacatttcctttaatttcaggaggaagagggtaatccggatgagttttctgacctactctgctgctgtgattaaacaaccaccaggaaattttgacgacactgttctcctgagctcctccctttcctccgggaacaaaacaattgaatttacaaaaataaagtgttatttgactggagtgaggtctcatgtctgcttatgcggtggctcgctgctcagaacagggtgagtctctgggttgtgtgctgaggaggggaggctctcaatctggagaaaacccactgcaggggacacctccatggggtctgagggactgaggatgaggagccggactgggtctagggaaggaggaggtttcagagggtgaaattctggcactaaagcctgggggtgtttgggaacttcctccttccgaagaagtttcagggagggataaagacaaaccctgggctccttgaggggcccttactaatttgagaggactctatcgggaaggagagtgacaatggcctccttgaggactgaggcccctgaataaatgaggcccagatacagtccatgggggatgagaccttcaagggtcacattttggttgggacagaggaaaagtgcagctctgcagccgcagaggaaaacccggcagtgtgaaagcgaccttggaggggccctgtgcgctctgaatgcgtctgagcccccatcccctgtccccgcctctctttctggattcttccagctcggctgtctccgccatcttctgagcgctccaccctgacttattcaagtttcccttctgccttccaagtactccaaaatctttcagatctgtgtccctacccctgtttttagcatgtgttggggctccaggtccctgaaggtttctggcctgaaatccacctccccagcggagtggactgcgttctagagactccacactccgcgaggttcccaggcccctgagggacaaccgagtggcctgcgcacttcagggctccacactcggcaaggtctttcaagcccttggggtccccttcttagttttttccacctttctgggctgcagtcactccataaatgctgggatctgatccccacccccactctcgtttcctcaattctgcgggctacacgctctggcaaggtcctccgggccctggatcccctccctctccctatgcccacgctcctagtcagcccttctggggtccactattttcaggaactaaccgttctcatggagccttgctaaccggaaagctgtgtggaagaaaggctttgaggatagaggtggagatttggctcttccatagtgccactcacccaccccaccatgctgccactgccagacccggacccctgtttcagaacaagtgaccagattcgctcctggacagccctggacactggccttttctctgaaaactactcaccctttctctagtccccacttcatgccagcctcataccctcttccttcccccacgctggcttccgggatcctcctctgctcagacaacctcttctgtgtcccacccccgtttttagaatgctttggggcaccaggttgggggaaggtttctggcctgatatccatctctttccaaactcccttcttcccttgaaaggcttcttgccttcagccccacttctggctccgaggtttcaggacaccctcctcttcatcctcattcttttgaccaccagctttttaggaattcgaacgtccctctcatcttcgtgaatcctgtccaggcatttgttgaccccttcatctgatacccctgacctcacattgccaaaagtctacccctacccagtacactggaattagacaaaatcccaggagttttacctcaactctgagtgtgcccacaggagctctccctgaagccacgtccttttaagcagggtctagggttcctcccttgtcttaatgaactctttgtcacacggaggacgttatggagcccttatgatctttcactgcctttctgcccagcgttttgtctttccatggacatttataatattttccatggacattttgttctctcaatgtccacccctaatttccaacatcccaaagattctcatgtgtttcctgaaagccatttacaggaatggctgtgcccagacccccttccccaggatcctccttcacacctggtaggtgcctctcctagagagatttgcactcagttgtcgtgcagtcacatggcccagatggttgttaatcacccccttcctggcaacagctagcagccagggaatcactggcacagaaacctcagggtgaccaagatgaggccacctctgtgctgaaggctgtgctccagagcctgcttgggatcaggcttaagcaggtcttcagccagacctgatgttacctggtttccttgagctgccctgcctgagctatcgggagcactccctcaatgcacatcttgattccctatctcatgctctgcttctagaaaccatgagctatcaattgctactggcaatggtcctgggaagtcaaccctaagtatggattctggggttggatgactccccacaggacttcagtgagcaacaatcactgctggcagttggaggacagagtcgctagggcatgtgaccactgtgaaaccaccgatgtttcacctggggtaattttggatgaactacggtagaagcactgaaggtacattgcttttggtttggaagattgtaggtaaataatagcgatatgaatgtggaattggatggctgcaaacgagtgccattgatgcattgaaagaggaaaagtcaggctgtcacctgtcactcagcaatttaaagtgtgagagttgggactagatgtggtggctcacatctataatccagagattcgggggaagcttgaagaggtaggatcttttgagtccaggagttccagaccagcctggacaccagagcaagacctcatctctacaacaaaattttcttaaaaattagatgggcttggtggcacgcacctgtacttgtagatctagctaatggggagcatgagataaaaaaatcacctgagtcagggacttaggggttacaatgaggtatgattgtgccagtgcacacactcccacctggccaacagagtgagattctgcttccaaaaaaataagaaataaatcaggtttgagagttggaaagcatcatcttctcctagagccaaaggacatgtacaactgagacccaggaacaaagcttcatcacaaagagaccatcatcagtggagccgggagatgcattccccctcaccctgccttgaggaggcagtggagtcatctgtctgggatcctttctgacccagccctatttgtttgtctctttggcttctttggatttgtatattttagctgttataacactgtaaaacaaacagagtgatttttttgagttgtgtgaatgatgctagctccatagtcaccctgagagtgatgggaacttttgaatttgtggcaagttggagggtagtgtaagtgacctgagattgccaaattggggctagcactggatgtgaggttaggctagtggaaaaatatgcccagaaccagaggagtgtgggctcactgcaggtggttaggctcagatccaaattgtacagatggatagctttggggtaaagaataacatagttgagaagtgcatgtgttagtctgttcatgcactgctataaagaattacctgagactgggtaattatttataaaactcaggtttaattgggtcatggttccacaggctgtacaaaaagtatgatgctggccatcagctcaacttctggggaggccccagaatagttagagtcatggcaaaaagtacaagggaagcaggctcatcttccacggccagagctggagcaagtggtaggagaggtgatacacactttcaaacaagtaggtcttttgagaactccatcaccggacagcacctatgggatggtgctaaattattcatgaaatatccgcctccataatccactcaactgtcaccagcgcagccagccccacctccaacagtggggattacaattccatatgaggtgtgggtggggacacagctccaacctcaatcagtgggcatcctggattgggtctactatagaaggagaaccaggagctgactatgatcttgaaccctacccatgatggccgggcggggtgactcatgcctgtaaccccagcactttgggaggctgaggtgggtggatcgcctgaagtcaggagttagagaccagcctggccaacatggtgaaaacctgtctctactaaaaatacaaaaaattagaccggcgttgtgctggatgcctgtaatcacaccactacgctccagcatgggaaaaaataccaaaacttcgtctcaaaaaaaaaaaaaaaaaaaaaaaaaaaaagactgcccatgaccactgcaccagtgagagggacaccagcatcactgagatgcaagggctggacattcttcataggtcagagctcaaagcaggggacactgatacagagatgggctccatccatagcaccaaagtggtgagaggatgtgggaatggcagaggccagcactttgccatcaatgcaagggggtataaggaggtgacaccagtgccagagtacatcacggggggactgccctacaatatctaggacttacctcttagagcgtgtttcattagcgacaacagatataaatggcagacaggtgtgtccctgcattaacaggaaatagaaatcatcaagaggaacagaaggcagatgtcagcagccccttagaaagtcatcatccttcatacagttaaaatctgagacagttctcacacgagaaggcctaactcaaaaagaggctgggttctcatgaggcaggtttatgcaaaaccaaggaaggtgtacaagtttggaattctccagtttcccttggaaaagacctacagtcatttgcttaggtaactgagcactgaacaaaggtgagtattgttgtcttttagaagctcttggccaagaaggccttgttggcataaaacccatggtttggaaacatcaccatgacccctgttagagtaatggcctaagggtgggggtcaggaaattgatgtattccttgccaacttctgcctctaagtgagtgaactctgtttgtgaacctctctcctctgtggttatgttcctaggctctcatgtataatcaggagtcatagacttagaaacaggaaaaatacttacagtgtttttgtggcctgtgagctatgacttataattttaggaaaaaaacaattgcaaatggaaagcctaagtctatcaatgctcatccaagacaacataatcaataaaaaccaatatcaaatctcaaggcaaattatttcctgtatatagatggcagagatgagcaccaccatcaaaaactcaaggaccagtgctgtgggtccagtcatctgtttcatggaattcaccagtctggtatcttcaaaatccagaaggatgatggcagatggcaggaaagtaatgcaaacgtcatcaggtgtgaccccactgtagcagctgtgatggatgttttctctcaccatagcaataaataacacaacctcggtcacactgtatgcattgttggtctgcaaaatccatgttttgcaaaactcttcaggaaggtggatctgtaatattggcattgacatgagaacaacagcagtatttattcacaatctcaagctctctgtcttcccgtctctctcattagccatccaagtagtcctgaggaaccaagcccatcagaacattctgcaacataatacacagctccattctccattcaaattttgttgttgttgttgttgttgatgagacaacatcttactccatcagccaggctgacgtacagtggggctatctgggctgactgtagtcttgagcttccaggctcaaggcatcctctcacctcagcctcctaagtggcttgaactacagacacacagcgacatgctgggctagtttttgtatattttgtagagacgtgctctcaccatgttattcaggctggactcaaactcctgagcgtaagtgatccaagcaccttggcctcaaagtgctgagattacaagcctgagccactgcacccagcccaatctccattctactgataacaatgtcattaccaggtctgatggacaggaaatggtaaggtttctgaaaacctaaggatcacacagcgagttccaaaggctgaaagtgcatacctgtcgacactgataccaatgacatccaatggtgagaatgacattccttgtagtcctagctctgctcataacaaatctatactgaagtgtaagagtttgatggtcatggggattttccatgtctctgcctttcagcgatgtgccatatctgtgaagtgttcagaaatgcaacagcctgaggcatgctgggcatatcctctaataaaaaggaaaatgccattttatggtcctgtatttctacaagttggaacacatgggcctgtgatccagatgggggaaatgggaatattcccactcattcaccttcatccacgaagcccatttgaaagctttgggcttcccatccttgtagattttagtgttgtgggctgggtgcagtggctttcacctgtactgccaacactttgggaggcctagacaggtgaatccactgaggccaaaagttcgagaccagcctggccaagatggtgaaaccccgtccctactaaaaatacaaaaattagcaaggtattggggccagcacctgtaatcccagctgctcgggaggctgaggctggagaatcgcttgaacccaaaaggcagagactgcagtgacccgatcctgcctttgcactccacctgggcaagcagaacaaaacttctgtcttgaaaaaaaaaacaaaaaacgaacaaaaaagatgttagagttctgggtttagaggtctataccccagaaagagaatggtttcaacaagggacaaagaagttgctttaaacgttgacttgccatttcttttcagtgtgtttgttctcttgcgtcaagagaccaccagaaaagtggtgcaattactctcctgtcaagaatcattgactatcatctgcaagagggtcagatcctggtatataattagggcagaaatacttagtctgagaagggtatgacatccagaggccctattaatgatgtccttttctccatgcctgactctgaccccatgtgctggactgcccctgtgtggatggcctcatggcctgctcggactctgaggtcccaccccaagtggcacctccatggagggctctactcttgtatgggctctgacactcacactgagacactctcccatggacacctcttcacccacttggggtctgaaactgggctactccatccctccctaacctggaacagagagctttcactgctattacacaagtcatagaggctaactcctcatttttccaagctaattattgaaacattagtcctgggttgataagacaagataagttaacttttcataaatttgcttatcaagttttgaataaattcaaataaattcaccttccccacacaccttagttgtcgacatcacacgcgcacccatactcacagggtgagcacgaaggcttcactgtcagtggagaaagtggcaaaacccttctgtgcctcatcctggtctagacctggccctcatcctttcccactcttcccctcactcccttggattcatccacactggcctcctgcctgctgctccacctccctgcgaagctcacccctgcctcagggcctttgcacgtgcagtggcttcaagccatatcctcttcacccagatctcccagatctcctgaatgatcttcttttatcattcaggtctcagcttgcatgtaatcttctcagtgaggattacccaaaccacatagttcattcattcattcaaatattcattcaatggcatattgacaaagcagctacttcatgccaggccttgggccaggtgttatggatatggcaacaaacaaaacaagagttttctgctctcaaatttttacccacttaaaggagatatcatacatcatctgtaaataaatacatcatctgtaaataatgatgtaaataaatacatcatctgtaaatctgtaaataatgatgtaaataaatacatcatctgtaaataaataaagtataataaaagaaaatagtaggtttttttggttggaggtgaccgtgaagtttgcaaataccatcttacaacacattattttattttatttcatttcatttttaattttattattattatactttaagttttagggtacatgtgcacaacgtgcagatttgttacatatgtatacatgtgtgaagttggtgtgctgcacccattaactcgtcatttagcattaggtatatctcctaatgctatccttcccccctcccccaccccacaacagtccccggtgtgtgatgttccccttcctgtgtccatgtgttctcattgttcagttcccccctatgagtgagaacatgcggtatttggttttttgtccttgtgatagtttgctgagaatgatggtttccagcttcatccatgtccctacaaaggacacgaactcatcattttttatggctgcatagtattccatggtgtatatgtgccacattttcttcatccagtctatcattgttggatatttgggttggttccaagtctttgctattgtgaagagtgccgcaataaacatacgtgtgcgtgtgtctttatagcagcatgatttataatcctttgggtatatacccagtaatgggatggctgggtcaaatggtatttctagctctagatcactgaggaatcgccacactgacttccacagtggttgaactagtttacagtcccaccaacagtgtaaaagtgttcctatttctccacatcctctccagcacctgttgtttcctgactttttaatgatcgccattctaactggtgtgagatggtatctcactgtggctttgatttgcatttctctgatggccagtgatgatgagcatttcttcatgtgttttttggctgcataaatgtcttcttttgagaaatgtctgttcatatccttcacccactttttgatggggttgtttgtttttttcttgtaaatttgtttgagttcattgtagattctggatattagccctttgtcagatgagtaggttgtgaaaattttctcccattctgcaggttacctgttcactctgatggtagtttcttttgctgtgcagaagctctttagtttaattagatcccatttgtcaattttggcttttgttgccattgcttttggtgttttagacatgaagtccttgcccgtgcctatgacctgaatggaaatgcctgggttttcttctagggtttttatggtttgaggtctaacatgtaagtctttaatccatcttgaattaatttttgtataaggtgtaaggaagggatccagtttcacctttctacatatggctagcctgttttcccagaaccatttattaaatagggaatcctttccccacttcttgtttttgtcaggtgtgtcaaagatcagatagttgtagatatgtgacattatttctgaggactctgttctgttgcattggtctatatctctgttttggtaccagtaccatgctgttttggttactgtagccttgtagtatagtttgaagtcaggtagcatgatgcctccagctttgctcttttggcttaggattgactttgcaatgcggggtcttttttggttccatgtgaactttaaagtagttttttccaattctgtgaagaaagtcattggtagcttgatggggatggcattgaatctataaattaccttgggcagtatggccattttcacgatattgattcttcctacccatgagcatggaatgttcttccatttgtttgtatcctcttttatttcattgagcagtggttttagttctccttgaagaggtccttcacatcccttgtaagttgggttcctaggtattttattccctttgaagcaattgtgaatgggagttcactcatgatttggctctctgtttgtctgttattggtgtataagaatgcttgtgatttttgtacattgattttgtatcctgagactttgctgaagttgcttatcagcttaaggagattttgggctgagacaatgggttttctagatatacaatcatgtcgtctgcaaacagggacaatttgacttcctcttttcctaattgaataccctttatttccttctcctgcctaattgccctggccagaacttccaacactatgttgaataggagtggtgagagagggcatccctgtcttgtgccagttttcaaagggaatgcttccagtttttgcccattcagtatgatattggctgtgggtttgtcatagatagctcttattattttgagatatgtcccatcaatacctaattattgagagttttcagcatgaagggttgttgaattttgtcaaaggccttttctgcatctattgagataatcatgtggtttttgtctttgggtctgtttatatgctggattacatttattgatttgcatatattgaaccagccttgcatcccagggatgaagcccacttgatcatggtggataagctttttgatgtgctgctggattcggtttgccagtattttactgaggacttttgcatcaatgttcatcaaggatattggtctaaaattctcttttttggttgtgtctctgcctggctttggtatcaggatgatgctggcctcataaaatgagttagggaggattccctctttttctattgattggaatagtttcaggaggaatggtaccagttcctccttgtacctctggtagaattgggctgtgaatccatctggtcctggactgtttttggttggtaagctattgattattgccacaatttcagatcctgttattgctctattcagagattcaacttcttcctggtttagtcttgggaaggtgtatgtgtccaggaatttatccatttcttctagattttctagtttatttgcgtagaggtgtttgtagtattctctgatggtagtttgtatttctgtgggatcagtggtgatatcacctttatcattttttattgcatctatttgattcttctctctttttttctttattagtcttgctaccggtctatcaattttgttgatccttttaaaaaaccagctcctggattcattaattttttgaagggttttttgtgtctctatttccttcagttctgctctgattttagttatttcttgccttctgctagcttttgaatgtgtttgctcttgcttttctagttcttttaattgtgatgttagggtgtcaattttggatctttcctgctttctcttgtgggcatttagtgttataaatttccctctacacactgctttgaatgtgtcccagagattgtggtatgttgtgtcttttttctcgttggtttcaaagaacatctttatttctgccttcattttgttatgtacccagtagtcattcaggagcaggttgttcagtttccatgtagttgagcggttttgagtgagtttcttaatcctgagttctagtttgattgcactgtggtctgagagacagtttgttataatttctgttcttttacatttgctgaggagagctttacttccaagtatgtggtcaattttggaataggtgtggtgtgatgctgaaaaaaatgtatattctgttgatttggggtggagagttctgtagatgtctattaggtccgcttggtgcagagctgagttcaaatcctgggtatccttgttaactttctgtctcattgatctgtctaatgttgacagtggggtgttaaagtctcccattattattgtgtgggagtctaagtctctttgtaggtcactcaggacttgctttatgaatctgggtgctcctgtattgggtgcatatatatttaggatagttagctcttcttgttgaattgatccctttaccattatgtaatggccttttttgtctcttacgatatttgttggtttaaagcctgttttatcagagactaggattgcaacacctgcctttttttgttttccattttcttggtagatcttcctccatccctttattttgagcttatgtgtgtctctgcacgtgagatgggtttcctgaatacagcacactgatgggtcttgactctttatccaatttgccagtctgtgtcttttaattggagcatttagcccatttacatttaaggttaatattgttatgtgtgaatttgatcctgtcgttatgatgttagctggttattttgctcattggttgatgcggtttcttcctagccttgatggtctttacaatttggcatgtttttgcagtggctggtactgactgttcctttccatgtttagcgcttccttcaggagctcttttagggcaggtctggtggtgacaaaatccctcagcatttgcttgtctgtaaaggattttatttctccttcacttatgaagcttagtttggctggatatgaaattctgggttgaaaattcttttctttaagaatgttgaatattggcccccactgtcttctggcttctagagtttctgccaagagatcagccgttagtctgatgggcttccctttgtgggtaacccgacctttctctctggctgcccttaacattttttccttcatttcaactttggtgaatctgacaattatgtgtcttggagttgctcttcttgaggagtatctttgtggcattctctgtatttcctgaatttgaatgttggcctgccttgctaggttgcagaagttctcctgggtaatatcctgaagagtgttttccagcttggttccattctccccatcactttcaggtacactaatcaaacgtagatttaatcttttcacatagttccatatttcttggaggctttgtttgtttctttttactctctttcctctaaacttctcttctcacttcatttcattaatttgatcttcattcacttatatactttcttccacttcatcaaatcggctactgaaggtattgcatgcatcatgtagttctcatgccatggttttcagctctatcaggtcatttaaggtcttctgtacattgttttctctacttagccattcgtctaatcttttttcaaggtttttagcttccttgtgatgggtttgaacatcccctttagctcagagatgtttgttattactgaccttctgaagcctgcttctgtcaacttgtcaaagtcattctccatccagctttgttccattgctggtgaggagctgcgatcctttggaggagaagaggtgctctggtttatagaattttcagcttttctgctctggtttctccccatctttgtggttttatctacctttggtctttgataatggtgacctagagatggggttttggtgtggatgtcctttttgttgatgttgatgctgttcctttctgtttgttagttttccttcgaacagtcaggttcctcagctgcaggtctgttggagtttgccggaggtccactccagaccctgtttgcctgggtatcaccagcggaggctgcagaatagcaaatattgcacaacagcaaatattgctgcctgatccttcctctggaagcttcgtctcaaaggggtgcctggctgtatgaggtgtcagttggcccctactgggaggtgtctcccagttaggctagatgggggttagggacccacttgagaaggcagcctgtccattcacagagctcaaacactatgctaggagagccactgctctcttcagtgctgtcagatggggatgtttaagtctgcagaaatttctgctgccttttattcagctatgccctgcccctacagatggagtctacagaggcaggcaggcctcattgagctgcggtgggctcctcccagttcgagcttccagaccactttgtttacctactgaagcctcagaaatggtgaacacccctcccccacccagtctgccgccttgcagttccatctcagactgctgtgctagcagtgagcgaggctccatgggcgtgggacccactgagccaggcacaggatataatctcctggtgtgccatttgctaagaccattggaaaagcacagtattaaggtgggagtgtcccaattttcccagtacagtctgtcacgggttccctcatctaggaaaggtaaatcccctaaccccttgtgcttcccggtgacgcaatgccccaccctgcttcagctagccctccatgggctgcatccactgtccaaccagcccaatgagatgaacaaggtacctcagttggaaatgcagaaatcacccatcttctgtgtggatcaggctgggagctgcagaccggagttgctcctattcggccatcttggaatggcaatctatgtttgctttttacatttgaaaaaactggtgtcacgtacctaggtattaatcattgtggtatcctcttgccgatttacctctttatcattaactagtgaccctccttgtcttttgttgttacagtctgtgattttagtctattttatctaatatgagaatagctactctggcacttttttggtttccagcttcatgaaatatccttttccatttccctgttttcatttccctttcggtgtctctatagatgaagttgatttctttaaggcaccataagttgggtcttatttctttatccatttgaccatttagagaatttagaacactgtcagtgttattattcataagtaaaaacttaagagtgggtgtagtggtgtacatctgtatttcctgcactttgagagactgaggcgagctgatctcctggggtcaggagtttgagaccggcctggtcaacatgatgaaaccctgtctctactaaaaatacaaaaattagccaagcatgctggcatgtgcctgtaatccaatttacttgggaggctgaggcaggagaagcttgaacctgggagacaaatgttgcagtgagctgagatcacacagagaagtcatctccactctcctcatcagaacctcttgttcacagcatttgtgagcacaaatcaatgatggttattctttcctactaattagggatattttattacacagcaatagcctccagcaaagggaaccatcatacatgattcctacaagttgacagggctggaattatcactgaaaaactaaggtggctatacttgattcccaatgtccaatttttcatgaatagagaaatttatcctttttccccccagccagaaaccaagttttgctcttacgcccaggctggaatcaagtggcacaatctcagctcactgcaacctctgccccccagcttcaagaaattcaccttttgaacaaggagatattaaggatacactatgtgtatgctaccggtggttgcaggagactcagaaaagagagaaacagtcactggcctcgtgcaactgatattctcgggaggagagaaaggcaatcaagaaagaaacatgctgtatttcagacagctgtaagtcctccacaagaaaagaaagcaggtgaggaacataggaaatgtgtcaaccataaggttcccgctaattctataagttggtcagggatatcctccaagaataagcagcatctgagcaatcacctgaagggaggaaggaaggaagactgtgagtggtggcttacacctgtaatcccagcactttgggaggccaaggagggcagattgcctgagctcaggagttcacgaccactcagagcaacctgttgatacccaatctctactaaaaacacacaaaaaaattacccgggtgtggtggcacgcacctgtagtcccagcttccatgcccagctgatttctctctctccatatatatatatatatacacatatattgtttttgcagagatagggtctcactgtgtcacccagtcatcaagcaattctcttatactgttttggaaaagcatgggaattacaggtgtgaaataccctgctggtcctgaaaaatgtgatatttgggattctctgcctggcttgttttacccaaaataatgacctccagttccttccaggttgctgcaaaagacatgattttcactgttttataactgaatagtattcctgtatgtatacataccacattttctttatttattcttctgttgattgacatgtagggtgattccatgtctttgctactgtaaataatgctgcagcaaatatttgtgtgcattttgatctattcctttgagtaggtacccagtactgcaactgcaggactgagtagttgttatattttttgttctttcagaaatctccatagtgtttgccataaaatctgcactaatttacattcccaacaacaatgcataagatttccccttttctccacattctcactaacatttgttatgtttttgtctttttcataatacccattctgactggagtaagatatctcattgtggtggttgttgatatttttgagacggggtctcactctgttgccagactggagtgcagtggtgtgatcgtggcttgctgcaacctccacctcccgggttcaagcaattctcctgcctcagcctcccgagtagctgggactacaggcgcgtgccaacaggcctggctcattttttgtatttttagtaaagacagggtttcaccatgttggccaggatgatcacagtctcttgagctcatcatacacctgcctcagcctcccaaagtgttggaattacagtcatgaggcagcgcacccaacctcaatgtggttttaatgaccatttctctgacgattcatggtgtggagaatttctttgaaataccttttggccatttatatgtgctcttttaaaaactgactcctgtccaggtgcggttgagcatgcctgtaaccccagaacttcgggaggctgaggccaatggatcacttgaggcaaagaggcagaaatcagcctggccaacaaggcaaaaccccatctttactaaaaatacaaaaaatcagccacgggctgtgactcgtgcctgtggtgcaagttactcaggaggttaaggcacaggaattgcttgaacccggtaggcacaggtcacagtgagccaagatcatggcactgcactacagcatgggtaatagagaaagacctgtctcataaaaacaaatgaataaataaataagataaaaaataaaaaagtctctttatgtcctttgccgactttttaatgggattctttggagttttctgttgtagttgagatctttgtttactctcggtattagtcttttgtcaaaggaaaagtttacaaataatttcttccgttctgcagtttgtctgctcactctgttgagaggattatttctttggctgtgcagcagctttttgtttcagtaaagcttttgaatttatataattaaaattttcagtttggtttaaatttgcactggtcgatttttggttttgttgcctgtacttttgaagtcatactcttgaactctttactagacaataaccagaagagttttctctagttttcttctcacatttttattatttcagtacatatatttaagtctataattcatcttcaattgatttttgtagaaatagtgagaaataggagtccaggtttattcttctgcaaatgacaattcaattgttccagcaccaattattgaaaagggtgtgctttcctcaacgtatattcttatcagctttgtcaaagatcagttggctataaatgtgtggctttctttctgggctctctagtctgttacatcaatctgtgtgtctatctgtatactactaccatgctgtattggtgatgatggctttgtaatataatttgaagtcaagaaatgtgatgctcccagctttgtttatttgcttcagaaaggctgagtcaacagctgcagagatgaagctgcccctcctcgcagggctccttcccggaaaaagatcatggctcccactgaccatataaccatggctggaactcctgaaattcccaaagggaggccctacccagtgaggggggatgaatgaaggtcctacttaaggaatctgtctggccacaatcaggcacagcagctgtgctgccttgtgggggaccagaccacctggattccctggagcctgcaggctagaatgtctgagtccatggaaacacagaaatggaggccgccctcacctccccagaaaactgtagtctcaggcagtctccagccgattgccactggttggctgctattccaagccagtgggtcttaacttgagaggtgctgtggaagtggggcccacggaatgaggctgcttggctccctggattcagccccttttctaagggaatgtacagatggaactcccgccttgcccagctttccaagtatataaaactcctgagtctctgtgagtgtctgagcgagtgctctggcaacattcgacacggctctgtgtatctgacccaagacccttatggcatgagctaatgggaggatcttctgatccatgcgtggcaaagatgcatgggagaaacatggtttgtgggtaggggttgtgcattcactactgcttctcttggctgtaggtgaaggtttctttggctctgtgctgatactgggtgcaccatcacccaccccctttgtttcttctcctgggtcaagtcatttgcctaatcagtcccaatgtaggaacctggatacttcagttcaaggtgctgaattcaccgtgcttttcattcaggggaagacagctgcttctcattgggcatcttggcctgcccacttcacgtcactttttgtaaaatccacaccactccaggaatatccattacttaacttcgcctgaaataaacagaaggctcattacacttatcatgggctcacttacttcgcctataatgaaggtgccatggaaatgctagtggatgacgtggtccattttcttagggatgagatagaaaaatggtgtatggctttttaatttaattaaaatttttagtttggtttaaatttacattggtctctttttggttttgttgcctgtacttttgaagtcttactcgtgaactctttactggacaatgaccagaagagttttccctaagtttcttctgatattttgaccatttcagtacatacatttcagtctataattcactttaaattgatttttgtaaacatggtaagaaataggagttcagatttattcttccgcatatgataatgcaactgtcccagtaccaattattgaaaagggtgtgctttccctagtgtatattcttgtcagctttgtcaaagatcagttgcctatgaatgtgtggctttcattttggattctctcgtctgttacatcaatctgtgtgtccacatttatacctgtaccatgctgtattggtgactatggctgtgtaatatattttagagttaggaaatgtgatgctcccagctttgttcatttgcttcagctgaaaaggttgagtccacaattacaaagatggcagccgcccatccccggaggacctccaacccagaaagagatcaggcttcccaccaaccctataaccctggctggagttcctgaaattccaacagggaggaccttcccagtgaggagggatgaatcaaggtcaaatttaaagaaacagtctggccactatcaggcacagcagcagtgctgccttgtgggggacccctcctgctccagaccagctgccctccctggagcccgaaggctagattgtctgagtctacggaaacagagacggtggccgccccaaccacccagaactcggtagtctcaggcacttggcttgctatcttgccactgcttggctggtattccaagcccgtgggacttgagaagtgctgtgatgatggggaccacaggatgaggctgtctggctccctgtgatatggctgtgatgagtggaggaacaccagggctcatgtctcacacagaattggagaaaatgacacaaacacatgtacagtggttttatggcgtgcagtttaataggcaagaacgaaggaagagctccccatactgagacagagggaggggggctccaaagccaaaagaggaaacccggagtgctgtggataccaatgagttatatgaagaaactggagggggcggtgtctgatttgcatagggttcaggcgattggttcgaccaggcatgtcatttatgtggcccacggaaaaactggccctcccacctagcctttgaatatgcacgtgccggacaccctgatttcctacactcatggggatatatgggggtggccatatcgccaggcacaggtggggacaagggccagaagagggcgggaatcgctatgtttgggtggacccagtttctaatggccggcatctgcagatcaaggttaccggagaactctaaaagccggggctttcctgctagacaagactcatttctggagctgctttaaaaagaaacaaaacttcccaaggaccccttttcctccctgtctgcccaaaataatttcttaacaactcgtataacacctgaattcagcccccttactgggggaatgtaccaacggaactcccacctttcctggtttctcaaggctagattgtgtaaacctcctgggtctcggtctgtgtctgagcagctgctctgccaacactccacacagccctgtgtactaggcccaaggccgccgtgactcagcccatgggaggatctcctgatttcttggttgcaaagatccatgggagaaaaatggtttctggggcggggtcacacactcatggcttctcttggctgtgcaagaaggttcctttggctctgttccaatatagcgtggttcatcacccacccctgttttctttgttctcctgagtcaagttgtttgcctagtcagtcccaatgtgagaacctgaatatttcagttcacgtgcttatcgtgaaattcactgagactttaattcagtggaaggcagcctcttctaattggccatcttggcccgccccctccacgtcacctcccataaaatggccacgctctccagggacgatgccattatatatctttacgtgaaaccgacagaacacttattacactttttgtgagctcatttacttcacttataatgaacatggccatggaaatgctagtggagaaagtggtcgattttctgatggatgtgataaaaaaatggtttgccgaccaattaatgacatatgtctcaaaactagtaacgagacccttaatcgctgggttgaagtttctaatcaagaagatgctcatctatgtattcaacaaagcagcttcccttgcttctgaaatgcttccaaacaacatctcatatttcctgaagaagataatgcctggacaagcagcacaagtcattcaggtttactttcagctcataaatccagcaggatattcgcacaattgttgggaaaccttatcagttcatgagtcgtgcatgtttcctttaatttcaggaggaagagggtaatctggaagagtttcctgacctactctgctgctgtgattaaacaaccaccaggaaattttgatgacactgttctcctgagctcctccctttcctcggggaagaaaagcattgaaactacaaaaataaagtgttatttggctggagtgaggtctcatgtctgcttatgcggtggctcgctgctcagaacagggtgagtctctgagttgtacgctgaggaggggaggctgtcaatctagaaaaaacccattgcatgggacacctccatggggtctggggggctgaggatgaggagctggactggatctagggaaggaggaggtttcagagggtgaaattctggcagtaaatcctgggggtgtttgaaaacttcctccctcagaaggagaagactcagggaggaataaggacaaaccatgggtcccttgaggggcatttactaacttaagaggactttatcgggaagcagagtgacaatggcctccttgaggactgaggcccctggataaatgaggcccagatccagatccagtccatgggagatgagaccttcaagggacatatttttgttgggacagaggaaaagtgcagctctgcagctgcagaggaagccttggcagtgtgaaagcgaccttggagggggccctgtgcgttctgaatgcttctgaggtccatcccctgtccccgcctctttttctggattttttgggctccatggtctccgccatcttctgagcgctccacgctgccaccttcagttttctcttctgggctccaaatactccaaaatctttcatatctgtgcccctacccctgtttttagcatgtgttgggactccaggtccctgaaggtttctggcctgaaatccacctccccagcggtgtggattctgctctagagaccccgcacttggcaaggttcccaggcccctgggggacaaccgagtggtatgtgcacttcagggctccacactcggcaaggtctttcaagcccttggggttccctcctcagttttcttcacatgtctgggatgtagtcactctataaatgccgggatgtgatccccaccccagtgattttttttagttccatgagtgttgctatctgaatagtcatcctgagagtgatgggaccttttgaatttgcagcaagttttagattagtgtgagtggcctgagatcgcaaaactggggctagcattggatgtgaggttaggctggtggaaaaatttgcccagaacctgaggagtgtgggctcactgcaggtggttaggatcagcacagaattgcaaggatgtatagctttggggtaaagaataacatggttcagaagtacatgtattagtcttttcatgcattgctataaagaattacctgagactgggtaattaattataaaaactcaggtttaattggctcatggttccacaggctgtacaaaaaggatgatgctggccatcagctcaacttctggggaggcgtcagaaaacttagagtcatggcaaaaagcacaagggaatcaggctcatcctccatggccagagctggagctagtggtaggagaggtgctgcacacttttgaacaatcagatctttttagaactctatcaccagacagcacctagaggatggtgctaaattattcatgaaatatccacccatatgatccactcaattctcaccggcccaaccaggaccacctccaccattggggattacaattacacatgagatgtgggtggggacacagatccaaactcgatcagtgggcatcttggactgggtctactatagaagaagaaccaggagctgactatcatccttaagactgcccatgatggccaggcagggtggctcatgcctgtaatcccagcactttgggaagccaaggtgggtgaatcccctgaggtcaggagtttgagaccagcctcgccaacatggtgaaaccctgcctctactaaaaacacaaaaaattagatgggtgttgtgccagacgcctgtaatcacagctactccagaggctgaggcatgagaattgcttgaacctgggaggcggaggtggcggtgagccccaatcgcactgctacactccagcatgggcaacaataccaaaacatcgtctcaaaaaaaaaaaaaaaaaaaaaaaaggctgcccatgaccactgccccagtgagagggacaccagcatggctaagatcaagtgctggacattcttcatgggtcagacattaaagcaggccacactgttacagagatgggctccattcatagcaacaaagtggtgagaagatgtgggaatggcagaggccagcactttgccatcaatgcaaggtgggcataaggagctggcaccagtgccagagtgcatcaggggaggactgctttgcaatatctagcacttacctcttagagtatgtttcattagggacaacagatataaatggcagacaagtgagtcccttcagtaacaggaaatagaaatcatcaagaggaacagaaacagatgtcagcagccctcatataaagtcatcatccttcatccagttaaaacctgagacagttctcacataagaaggtctaattcaaaaagagactgggttctcatgaggcaggttcatgcaaaaccaagggaagtatacaactttgggattctccagcttcccttggaaaagacctacaatcatttgcttaggtaactgagcactgaacaaaggtgagtattgttatctttcagaagctgttggccatgaaggtcttgctggcataaaacccatggttggaaacatcaccatgacccctgttagagtaatggcctaagggcaagggtcaggaaattgatgtattccttgccaacttctgcgagacgagtgttggtccactcatctctttcacggaattcaccagtctggtatcttcaaaatccagaaggatgatggcagatggcaggaaactaatgcaaacaccatcagttgtacctccactgtagcagcagtaatggatgttatctcttcattgtaatatccagggagggagaagatgacattattctcaatattctaaacaccctgtgtgtacagcctctgtgatattttttgtaatatccgtgtgggagagaattatattactcctaatatctcaggggttgtgccccctctgtgacaatgttcctaacacccaggaggggataggatgatatcacttttagcatcacagggggtgtacaccccactgtaatattgttcataatatccgggggggagagaatgatattactcccaatatcgcaaagactgtacaccaacctgtgatattatttgtaatatccataagaggaagaataatattactcccaatgtcacaggaagtgtacacccttctgtgatattgttcaaaagatccagttagggaggggatgatattactctcaatatcttaaacaccctgtaggtaagccctctgtgatattcctcataatatccagagggagaggatgatattactcccaatattgcatgaagtctacaccccacctgtgatattgttcctaatatccaggatgggagaggatgatattactcccaatgtcgcaggggatgtacaccttccctgtaatattgttcgtaatatctagaaaaggagaggataatattactttcaacatcgcagggggtgtacaccttccttgttatattgttgctaatatccagggaaaaagaagatgacattaccaccactattgcagaaggtgtacacccccccttgatatagttcctaatatccagaaaaggagaggagatattactccaaatattgcaagaggtgtacattcccctgtaatatttttcctaacattcaggaagaaagagagtgatattgcccttaatattgaagggagtgtgccccccccgtgatattgtttctaatatccaagaaatgaaaggatgatattactcccaatatcacaggggctgtacagccccctcccatgatattgttcccaacatcggggggggggtgaaatagtattattcccagtatcacaataggtgtacacacctgtcgtgatattgttcctaatacccatgggggaaaggacgatattattcttaatatctcagagggatgtacaccctccctgtgatattgttcctaatatccggggtgggagaggatgatattacccccaaaatctcaaagggtgtacacccctcttgtgatattgttcctaatatccagggtggagaggataatattattcccaatatccaggaaaggaaacgatgatgttactgtgaatattccagggggtgtcctcccctctgtgatattgttcctaatatccaggttggggagattatgatatttctccaaatatcacaaggggtgtacaccaaccctgtgttattgttcctaatatcgatggggggagaggacgatattactcccaatatcacagggggtgtacaccacctttatgatattgttcctaatatccatgaagaaagaggatgatattactttcaatatcgcaggggatgtacactccccctgtgatattgttagtaatacctaggagaagaaagtgtgatattactcccaatatcgcaggggatgtacacgcttcctgtgatattgttcctaatatttagggggaaaggggatgatattactcccaatatcgaatggtgtgtacacccccccgtgattctttttttttttttttttttttttttgagatggagtcttgctctgccgcccagactggcgtgcaatggcgcaatctcggctcactgcaacatttgcctcccaggttcgcacgattctcctgcctcagccttcggagtagctgggattataggcagctgtcaccataccaggctaatttttgtatttttagtagagttggggtttcaccatgttggtcaggctggtcttgaattcctgacctcaaataatccacccaccttggcctcccaaagtcctgggattacaggcataactttccctgtgatattcttcctaatattcaggaagaaagaggatgatattgctcccaatatcgcagagagtgtgcactcctcctgtgatatggttcttaatattcagaggaggagaggatgatattactttctatattgcagaaggtgtacacctccctcgtgatgtctttcctaatatccagtgggggagaggttattagtctcaaaatcacagaaggtgtaaacccccatttgatattgttcctaatattcaggggtggggagagaaaggtattactcctagtatttcagggcatgaacacccccaccgtgatatcattcctaatatccagaaggggaggcaatgatatttctcctaatatcacaaagggtgtacaccccttctgtgatattgtaaatattctgtgtgtacacccccctgtgttatagtctgtaatatccgggtgggggagagggtgatatttctccccatattgtaggggatgtacacccttctgtgatatggttcgttatatccagggaagaaaaaggtaatattgctgcccatattgtggagagtgtacacccccatgtaatatggttcgtaatatccaggagtggagagggtgatactgctccttacatcgaggaaggtgtacaccttattgttatatgattcgcaatatccaggggaggagagagtgatattgctccccatgtcgcagggggtgtaaaccctccgtgatatgattggtaatatccaggaaaggaaagggtgatatttctccccatatcgcgggggacgtacatcctcctgtgatatggttcgtaatatccaggaggaaagaggaaaatattgctcttcataacccgaggggtgtacaacccctgtgatatggttcgtaatacccagaagtgtacacccctctgtgatatggtttgtaatatccagggggttagagggtgatattgctccccatatcgcagtgggggtacacccccctggattggttcataatattcatggggggagaaatttacatttatcctcatatcagggggggtgtacaccccccgtgatatggttcgtaatatccaggggaagaaagggtgatattgctccttatatcgcggaaggatcaccctcccctgtgatatggttcataatacccagacgggaagagggtgatattgttcttcataaagcgaagggtgtacagccccctgtgatatggttcataatatgcaaaaggggagagggtgatattgctccccatatcacggagggtgtactcccttctttgatatggttcgtaatatccaggggtgtagatggtgatatagctcgccctattggggagggtgttcacccctctgtgatattgttcgtaatgtccagggaaagagaggatgatattactcccaatatcgcagaaggtttacaccactctgtgatattgttcataatatccagggaaggagaagacgatattactcccaatatggcagggggtgtagaactcctgtgatattgtttgtaatatccaggcaaggagaggatattactctcaatatcgcagaaggtttacacccctatgtgatactgttcatgatatccagggaaaaagaggatattactccctatatcacaaagggtgtacacccctttgtgatattttttgtaatatccaggggagagaggataatattactctcaatatcagaaggggtgaaaaccctcctgtgtcattgttcataatatttagggaaggagagagtgatattactccaaatatcacagtgggtgtacacccccctatgatattgttcctaatttccagaaggggagatatgatattattgccaatatcgcagaaggtgtacaccttactctgacattgtttgtaatatccagatggggaaatgatgatattactcctaatatcacagggggtgtacacccccttgttttattgtttgtaatattcaggggaagagacgattatattactcccaatatcgcagggtgtgtacaacactctatgatattgttcataatatccaggggaggagaggaagtgtacacccccccgtgatattgttcgtaatatccagaggtagagaggatgatattactcccaatattgcaggtggtgtacacctttctgtgatattgtcatgatattaagaaggggagaggatgatattactaacaatatcacaaaaactgtacactccctgtgatattgttcataatatccagaagaagggaggatgatattattctgaatctcgcagaagatatacaccaccctgtgatatggttcataatatcctaggggaaagaggatgacataactgtcaatatcgcagggggtgtacaattccctgtgatattgttcacaatattcagagggaaaaaggataatattactttcaatatcgcaggcggtgtacacattactgtgttattgtttataatatccggaatgagagaaaattttctcccaatatcacaggaggtgtacactcccctgtgatattgttcgtaatatccagggaggggagaggatactattactcccaacatctcagggagtgtaggccccccctttgatattgttcctaatattcggaagtggagaagatgatattacttccaaaatcgcagggggtgtacactccctctgtaatattgtttctaatattcatgagtggaaagaaagatattactcccagtattgcaggggacatacaccacactgtgatcttgttcacaatattcgggggggagaggatgatattactcccaatatcaaagtaggtgtacacccccttctgatattgatcgtaatatccagaattaaagatgataacgttactcccaatattgcagggggtgtacatttttgaatactgttcataatattaagagggggaggggatgatatctgtcccaatatcgcaaagtgtgtacacctcctgtgacattgtcccaaatatccagaggaaaaaaggatgttattactcttaatatctcagagagtgtacacctccctgtgatattgtttgtaacatccagaagaaagaggctgatattactcttaatatcgcagggggtgtacacccccgccccgggatattattcgtaatatccagggggaagtggaatgttcagaatgggagaggatgatattacttgcaatatcatagtgggtgtacaccccactgtgatattgtttgtaatatccgggaaaggagaaaatgacattcctccccatatggcaggggctgtacaccacctatcatattgttcaaaatatccagaaggggagaggatatgtctccaagtatcacagggggtgtacaccccgctgtaatattcttcctaatatccagggtgtgagaggataatagtactcccaatatcccagggcatgtacaccccccttgtgatgttgttcctaaaattcatggggagaaagaatattactcccaatatcacagggggtgtacatacactctgtaatattgttgccaatatgcagcaggagagaggatgatattactcccaatatcacaggggctgtacaccccgctgggatattgtttctaatatcaagggggaaaaaggatgatattactcccaatgtcgcagggtgtgtacttcctctttgtgacattgttcctaatatccaggagagaagagggtgacattccttccaaaactgaaaggggtgtacacaccctttgagatattgtctttaatatccagaacgaaacaggatgatataactcctaatactgcaggggggtacaccctctctgtgatactgtttctaatatccaggaggggaaagaaaaatattaatcccaatatcacagggggtgtacattccccctttaatattgttcctaatatccaggaagacacaggatgatactatttccagcagcacagggcatgtacacccctttgtgatattgttcctaatatccaggaaaagagaggatgatattactgtcaatattgcagggcgtatacactggttctgtgatattgtttctaatatccgggggtggagaaaatgatattactcccaatattccagcgggtgtacacccgttctatgatattgttcctaatatctgggggagagagaatgatattattgtcaatatcacaggggatgtacagattccctgtgatattgtttctaatattcacagggggagaagggtataatactcccgatatcgcagggggtgtacactccccctgtgaagttgttcctaatatccagggattgagagaatgatattactcccaatatcacaggcggtgtaaaccccctgtgtgatattgttcctaacatccagaggaaaagatgatgatattattttcaatatcacagggggtgtacgcatccctgtgatattgtttctaatatccaggggaggagaggatgatattattgttaatatcgcagggggtgtaccccaccctgtgatactgttcctaatatccggggtggaagaggataatattgctcccaatatcgcaaagggtgtacaaccttcctgagatattggtcctaatatccagggagggagaggatgatattactttcaatatcacagggagtttacacaacccctgcgatattgttcctaatatccagcggaagaagagttaggataatactattttcaaaattgctgggtctgtaccccctccccgtgatattgtttctaatatccaggaggggagaaagtaatatgactcccaatatcttagaagatgtacaccctccccataatattatttcttacatccagggggtagaggatgattttgctttcaatatcacagagggagtaaacctttccggtgatattgtttttaatatttaaaaagagagaagataaaattactcccaatacaaaggggatgtattgtgtactcccccctctgatattcttttttaatatccagatggagagaggatgatattactttcaatattgcatgggatgtataaatcccctgtgttattgttctgaatatacaggtggggagagtatgatattactccaaatatcgcagggggttctttccccctgtgatattgttcctaacattcagggagggagaggatgatattactcttaatattgcagggggtgtacccacgcctatgatattgttcctaatatccagagggggagaggatgatctaactcagaatatgacaaggggtgtacacacagcctgtgatatggttcctaatatacaggggagaaggggataatatttctcccaatatcgcagggggtgtacaaccccctgtgatactgttcctaatatacagaaggggacagcatgatattgttcctaatatcgcaggaggtgtacaacgccctgtgatattgttcctaatatccagggcgggagaggatgatattaccctcaatatcgcagggggtgtgcactttccctgttatattgttcctatgatccgggtggggggaaatgacattagtcccaatatcgcaggatgtgtgcaccgctcccccgtgatattgttcctaatatcaagggggagagaggaggatattactcccaatatcgcaagggatgtacatcctccatgcgatattgttcgtaatattcaggaggagagaggatgatattactcttaatatcgcagaaagtggacacccaccctgtgatgttcttcataatatccagggaagcagacgattatatgactttcaatatcgctgggagtgtacatcccttttgggatattgtttctaatatccaggaagggagaggattatattactctcagtattgcaggcagtgtacaccttttttgtgatattgttcctaatattcagaaagggaaaggatgatattactcccaatattgcaggtggtgtatatccccctctgatattgttccttatatcaaggaagagaaagaataatattactcccaatatcaaagacagtgtagacccctcctgtgatattgtatttaatatccatggggaaagaggatgatgttactcccaatatcgcagggggtttacacccacactgtgatattattcctaaaatccagtggaggagaaaataatattgctcccaatattgcagggtgtatacaggccctcccccgttatattgctcctaatatccagcggtggagaggatattactttcaatttgtgtagggagtgtatacccccctgtgatatttttctaatatcaaggatgggaaaggatgacattactcccaatatcgcaggaggtgtacacgccctgtgatattgttcctaatatctagggaaggagaggatgatattactttcaatattgcaggagctgtacaccctctgtggtattgttcttaatatttaggttgggagaaaatgatatgagtccaaatatcgcagaaggcatacacacttccaataacattgttcttaatatccgggggagagggtgatattactcccaaaatctctggggggtgtacacccccttctgatatttttcctaatatccagggaaggaaacgatgatattactataaatattccaaggagtgtacaccttcctaatatcctaatattgttcctaatatccaggggtgggagaggattatattactcccgatatcgcagtgggtgtacacccctcctgtgatattgtttctaatatccaagctaggagaaaatgatatcactctcaataccacagggggtgtacaccttccgcatcatattgttcctaatattcagagggaaagaagatgaagttactttcaatatcggaggggttgtacacaacccctgtgatattgctgctagtatccaggaagaaaggggattatgttactccccttatagcagggggtatacacctcccctgtaatattgttcctaatatcaaggctgggatatacgtggggggaaggatgatattactcccaatatcgcaggggttatacaaccttctgtgatattgctcctagtaaccagggcagaagaagatgatattactcctaatatcgcaggaggtgtacactcccccattatgttgttcccaatatgcagaaaaggagaggatgacattattgccagtatcgcagggtgtgtacaccacccctgtaatattgttccaaatatttagggggagagaggatgatattactcccaacatcgcagggggtgtacacacatcccctgtaatatagttcttaaaatctaggggaaaaggggatcttatttctctaaatattgcagagggtgtacactccccggtgatattgttcctaatagccgggagggagataattaaattactttcaatatctcagagagtgtacatcgcccttgcgatattgttcctaatatccagagcaaaagagaatgatattactcccaatatcttaggagtgtacatttaacctgtaatattgttcctaatatccagggggaagagaatagtattactgccaatatcgtaggggttgtacaccttttctgtgatattgttgcaaatatttagtagagggaaagaatattactcgcaatatcacagggaatgtatacttcccctgtgatattgttctgatatccagaaaaagagagggtaatattactcccaatattgcagggggtgtacaccccccttgtgatattgatcctaatataaaggaaggaagaggatattactcctcatatagaaggggttgtccaccccccttgtgatattattcctaatattcagggaagcagaggatgatattattttcaatatcacagagggtgtgcagtccacctgtgatattgttcttaatattcggggggagaggatgttattatgcctgatatcgcagtagaggtacacccctcaagtgatactgttcctaataaccaggggtgaagaggatgatattactcccaatatcgcaggtggtgtacacccccccatgatggtttctaatatacagagggggagaggaaaatattactcccaaaatcgctggaggtctacaccccccttgtgatattgttcctaatatccaggaaaggaaacgatgatattactgtgaatattccagggggtgtacacccgctttgtaatattgttcctcatatccagggtgtggagaggattatattactcccagtatcgcagggggtgcacgacgcccctgtgatattgtttttcatatccaggaggggagattattatcaatatggcaaggggtgaacaccccctgtgatattgtacttaatagttaggttggcagaaaatgatattagtctcgatatcgcagggggtgtgcactccgcctggtgatattgcttttaatatcaagggggagaaaatggcattactcccaatatcgcagggggtgtacaccgctcatgtgatattgttcctaatatccaggtggagagaacataatattactcccaatatcgcacaaggtgtacacccctcctgtgatatggttcctaatatccatgggaggagatgatgatattactcccaatatcacaggggatgtacaccacccttgtgatattgttcctaatatccagggaagaaaacgatgatattattgtgaatattacagggagtgtacacactccctgtgatattgtttttgatatacagggtgggagaggatgatattactcccaatatcacataaggtgtacaccccccgtgatattgttctaaatatttcggtggggagaaaatgatattagtctccatatcacagggggtgtgtgctcctcaggtgatattgtttttaatatcaagagggggaggagattatattactttcattatcacagggggtgtacacccctcctgtgatattgttccttatatccaggcgaggggaaaataatattactctcaatatcgcaggaggtgtacacaccccatgtgatattgttcctaatattaagggggaaagaagataatattactttcaatatcacagggtttgtactcctttcttgtgatatagtttttagtatccagggggaaagagcatgatattactcccattgtagcaaggggtgtacacacctcctgtgatattgttcctaatatccagaagtggtgaggatgatattactcccaatatcgcagggggtatacaccccacctatgatattatttctaatatccatgggaaaagagtatgatattacacccaatgtcgcagagggtgtgtatttttcctgtgatattgtttctaatattcaggcggggagaagatgatattactctcaatatagcagaaattgtacatccccgctgtgatattcttcataataatcagggaaaaagaggatgatattactaccaatattgcaggggggttacacttcccctatggtagtgttcctaatatccaggaagaaagaggatgatattaatcccattatccaggaagtgtacacccaccctgtcatgttgttcctaatatccagcagggaagaggatgatattacaccccccccccgtgatattctccttaatatccaggaggggagaggctgatattactggatatatagcaggggtgttcataccttctgtgatattgttcctaatatccagaaaaggagaggatgatattacttccaatatcgcagaaggtgtacacctccctgtgatattgatcctgacattcagaaggggagaggatgatattactcaaaataccgcagggcatgtgcattcccttgtgatattgttcctaatacccagaagggaacaggataatattactttcaatatcgcagggagtgcacacccccctttggtatggttcttaatatccagaaggaaagagggtgctattactttccatattgcaaggggtgtacaccccactgtggtatggttcataatatccaggcagggagagggtgctattactccccacagtgcggggcatgtacaccctgctgcggtacggttcctaatatccagggggagagaggatgctatgactccctatatcgcggggtgtgtacacccctgtgtggtatgttttgtattctccaggaacggagagggtgttgttacccctcatatcgctggaaatgtacactcccctgtggtatggttcgtaatatccaggggattgagggtactgttacccccatactccccatatcgtggggggagtgcacctccctgtggtatggttcgaaatatccagggtaagagagggtgctattattccccattttgcaggaggcgtacacccccctatggtatggttcgtaatatccggggtgaggggatgctatcaaaagaagagagaaagagaccccccatattgttctatattattttatactcagtacctgttttaagaagaaacaaggaagtgaaaccaaaagcaggcagcccggcgccaggcaccagacccaaaaccagacccgaaaccaggcctgggcctgcctgaccttagcctgatagttaaaattcaacccatgacctagcaaccaatgttatccatagattccagacattgtatggaaggacattgtgaaatttcttgttctgtgctgtttcactctgattaccggtgcctgcagcccctgtcacatacccactagattgctcaatcaatcatggccctttcatgtaagatctttagtgttgtgagcccttaaaaaggacagaaattgtgcactcaacaagctcggattttgagacgctagtctttcgatgcttccagctgattaaaagccacttccttcactacctcggtgtctgtggggttttgtccgcgactcctcctgctacactatgactccccatatcaaggggggtgtacacccccctgtggttcgtaatatccagcaggggaaaaggtgctattactccccatattgcagggagtgtacacccccttgtagtatggatcgtaaaatcaaggggggagggaaggtgtaattatccccatatctcagggggtgtacacccctttgtggtaaagtttgtaatatccagggatattacagggatattatccccaaattaatacttttataatttcttatgcctgcctttactgcaatctctgaacataaattgtgaagatttcatggacatttatcacttccccaatcaatacttttataatttcctatgcctgtctttactttaatctcttaatctcatcatctttgtgagctgaggatgtatgtcgcctcaggaccctgtgatgattgcattaactccacaaattgtttataaaacatgtgtatttgaacaatatgaaatctgggcaccctgaaaaagaacaggataagagcgatgttcagcgaacaagggagataagcataaggtctgactgcctgtggggctgggcagaacagagtcacatttttcttattgcagaaaatgagtaggagaaatatcactgggaagggaacgcattcctaggggaggcctatggacggccgctctgggggtgtatcccttatgtggttgaagataagggatgaaatacaccctggtcccctgcagtgccctcaggcttgctaggattagaaattccagcctggcgaattctagtcagaccagttctctgctcttgaaccccgtttcctgttaagatgtttatcaatgacaatgcgtgcacagcaggacatggaacctcaatagtaattccattttctccctggccttgtgaccttgctaggcccttctgcccttgtgatcttttattgccatttgaagcatgtgatctctgtgacccactccctattcgtatccccctccccttttgaagtccctaataaaaacttgctggttttgcagatcaggtggtcatcacagaacctgccgatatgtgatgtcaccccggaggctcagctgtaaaatttctctttcgtactctttcactttatttctcagaccaggtgacacttaaggaaaatagaaaagaacctactttgaaatattgggggctagttcccccaatagacattgttcctaatatccagaaaaaaagaagatgatattactcccaatatcacaggggttgtgaaccccacctgtgatatggttcctaatatccaggaagggagagaatgatattactctccatattgcagggggtgtgcacatccctgtgatattgttcctaatatccaggggaggagagggtgatattactcccaatattgcaagggttgtaaactccaccctgtaatattgctcctaatatttaggatttagggggggagaggataatattactcccaatatcgcaggggatgtatatgccctctttgatattgttcctaatatccagggggggagaggataatattactttccatatcacaaagagtgttcacccccctgtgatattgttcctaatatccaaaaaggaagaggatgatatcaatcccaatatcacaggaagtgtacaccccccccttttatattgtttctaatatccaggggaaatgagggtgatatttctctcaatatagcagaatgggtacactccccctgggatattattcctaatatccaggggaaaaaaagaggttgatattcttcccagtatagcagggaatgaatacaccctttgtgatattgcttctaatatcaaggggaaaagaggatgatatgactcccaatatcacaggggatgtaaacctgtggcgttgttgctaatatcaaggagggaagagtatgatattactcctaatgtcgccgaaggtgcacactttccctgtgatattgttcctaatatccaaaagggaagagaatgatattacccccagtattgcagggtgtacaccacccctgtgatattgctcctaatacccaggaaaaaagagaatgctattacccccaatatctaaggggacgtataccttccctgtgatattgtttctaatatccaagtggggagaggatggttttactctcaatattgcagggagtgtacactccccctgtgatactgtttctaatactcgggctgggagaaatagtattactcccaatatcgcagtgatattgtttccctgtgatattgtttctaatatctagtgggggagataattatattactaccccatacacaggggagggtgtacattcccctgtgatattgtttgtaatatccagggaaggagaggatgttactcccaatatcacaggggttgtacaccccttttttgatattgttcctaatatctggggggcagagaattatattactgtcaatatcacagagtgtgtacaccccctctgttatattactctttatattcagggcggtagaggatgatattactccctatatcacagggggtgttcacccctcctgtgatattgtttataatatctaaggggaaagaggatgatatcactctcaatatcaaaggaaatgtacacctttcctgtgatattgtttttattatataggggggcagaggatgatattaagaacaataccacaggggatgtacacccacgtattgatattgtccctaatatgtatggggaaagaggacagtgtaactcccgatatcgcagagtgtgtacacccccttgtgatattgtttctgatatacacggggagaaaagataatatttcttccaaaattgcagggggtgtacaaccccctgtgatattgtttttaatatccagtgggggagagaatattactcccaatattgcagggcgtgtacacaacccctgtgatattgttcctaatatccagagtaggggaggatgacattactttcaatatcgcaaggggtgtacattcccctgtgatattgctcctaatatccatgaggggagaggatgatattattcctaatatggcaggggctgtacaccttccctgtgatattgtttctaacatccagtgggggagaaaatgatattactccctatatcacagaaggtgtacactttccctgtgatattgttcctaatatccagaaggggagaggataatattactcccaatatcgcaggaagcttacaactcccctgtgatattgtttctaatatccagggaggtagggatgatattactcccaatatcgcaggggatgtacactcccccgtgacattgtttctaataaccagggggtgagaggatgatattacgcttaataccgaagggggtgtacacacccttgtgatattgtgcctaatagccagggggaagaaaattatattaattttaatatttatggggaaaaaggatgatattactcccaatatcacaggggctgtacaccgaccttttgatattgtttttaatatccagaagagaagaggataatattgctcccaatatcagaaaaggtgtaaaccccttctgtgatattggtcctaatatccagggagggagagaataatattactaccaatatcacagaaggtgcccacccccaaggtgatattgctcctaatatccaaagataatagggtgatgttactcccaatatcacaggaggtgttcacaccccttgtgatattgtttctaacgtacagggaagggagaggatgatattattcccaatatcacaggaggtgtatactcctctgtgatattgattttaatattcggggggaaaggatgatattactccctatatcgcagagggtgtacaccctctgtaatattgatcctaatatccagggcgggataggatgatattactcccaatatcgcagaaagtctacacaacccccagtaatattgtttttactatccagggggaagaggatgacattactcccaatttcacagagtgtgtacactcaccatttgatattgtttctaatatctagggggagagaatatattactcccaatatcacaggaattgtacaccacctctgtgacattcttgtgaatatccggggaaaaagagaataatattactcccaatattgcagagcgtgtacacccctccatgatatcgatactaatatttttttaaagaggatgatattactcccattgtcacaggatgtgtacaccccccttgtgaaattgttcataatattctggggggagagcataatattactccccatatcgaaaaaggtgtccaccctccttataatatggttcctaatatccaggatattacttaatccaggatacttgtaataccctaaatatacaattgcttgaacctccacctcccaggttcaagcaattcttctgcctcagcctcccgagtagctgggactacaggggcacaccaccacacccagctaatttttttttcttgtatttttagtagagatggggttttgccatattggccaggctggtctcaaactcctgaccttgtgatctgcccacctcagcctcccaaagtgctgggattataggcgtgacccaccgtgccaagccaggaagaggatgctctatagatttccccaataagagatggctttgcagggccattccaaaatatgtcaaagaaatacatttggggataaaatactttgatttcctttagggaatgttatctattatgtgatgctataccagagtcaggttggagtcggttatcttattgcaacaaagagtctgttccgtcactgttgggatctctattttttcctcttatttcttgagacagggtctcactctgtcacccagtctggagtgcagtggtgcgatcttcattcactgaaacctctgcctcctgtgttcaggtgattctcgtgcctcagccccttaagtaactaggattacaggtgtgcgccaccacacccagctaatttttgtattttcagtagagatggtattttgccctgttggccaggctggtcttgaactcctggcctcgtgtcatctgcccacctcgacctcccaaagtgctgggactgcaaatgtgagctattgtgcccagccaggatctctgttttaatgttagtgctggtcactttgcatgaactccaaagggaagaaatataatgaggtgtgtctgaccccctgccttctcatcgtgacctgaattagtttttcaggtttgcaggggatacccttggacaagaaggggctctattcggttggttggggggattagaattttactttttgtttacaatatttctcctgaaagagttaggggctcacaaggaatttccgcgtgagcaacttatgaggaaagccatctgggaagatatgtgtccttgtgtcactgggatattctcgtttaccccaatgatacggcaatgacgcagggttgtgaaattacagctatgtgtttggggaaaaaagaaagcaggattgtgtgactacgtttccaaacttcacttgcccttagccatagtgagttgggggcctggagattctgttttctttcacaatgatatagatacaattaaatgtatagaaagcaaaaaaataaaaaggtgagtaatgaggaacctctgattcctgagtggccatgtagttacccatggcacagagccacagttactgaaggtaaagtttgctggggaatttagaaatgaatccagctcttggaggagtcagtttactggatgcctaagaaaatgcaaacaaaataagaaaaaagggtaatattcaatcccatagttattgttacctgtcatagctaaagtaaaattaaaacagagtgctggcttcaatcttgatgctacactaagcttagatttcagtgaatgtgagtctcagccactagctcagagccacctcccaaagaccaaatcatgtagggacaatagaaagtacttctgagaattgtggttaccaagaacctagtaactgttggggaggagcaaaacaaagtacagaaaccagagggtacaatctgagtgagactgctatcagcttctggaggagcctttactaaaatgaatgatgagagtaactggatgatgagagtaactaatggatgatgagagtaagcaatgtctttggttttcttttttttttttttttttttttagcagacgtctcactcttgtcgcccaggctggagtgtaatggcatgatctcgcctcactgcaacctccacctcctgggttcaagcaattctcctgtctcagcctcccgagtagctgggactacaggcactcatcaccacacctggctaatttttgtatttttagtattttctggtgagggtccaggtttccggaaacaactcagagacatatgttaagatgttatctttagttttcacagggaaccaaatatgttacgactccaatttccttggctattgttttaagttaccattaccttctcgttgatcaagttgctcatttacttctcaagcctagctagatgcctggaatttcccttgaaggaagtcaagattttcctttatctccatactggctgatggtgatcgagtaagcccctaagaggggtccctgctccatctcgagatgctgctagattctacagtgcctaataaacagctctcgcctggccgacaaagagctgcttgctctctggatagcaattccaaagtgaacagacaacatcctgtttggaagactgccactctgttagaagaagcatcaggaaaacctttcttttgagctatttataactaacagcaattgaccaagtatacttttgtgagtgaaactgacctttctccctgtaagaattctccaaaatttggaaactatttgtgagtatttttacttatggcaatataattattggcacaagctcaatcagattcggttttctttcgtaacaggaaccattggagatactcattactctttgaaggcttacagtggaatgaattcaaatacgacttatttgaggaattgaagttgactttatggagctgataagaatcttcttggagaaaaaaagactgggtatattttcaatatgctttccttttaaggtccctcacctgtggaaagtaaagaatgtcactttctgacaggctcaggaacctcaagttatgtagggatctcaagaagatgggggaattcacccagttcatacaggtgaaattgctgttgcaaagattatgaatatgagagaagtccagcatggctgacttcatctcgtgtctggcctcaggctggctgcccttgctcactcttgggcataggccaagctagccatgggaggaatttagtttatagtttaactttgaagcacggatgataatagtctctccctaaaatgaaccccttccttgctcagggactgaaactacctttgtatgacaaatgaaagcccacaagattaagattatgagaggggcctgaattctgctaaaatgcaggtgtagctgactgataacaagtcattgtcccacagcttgcctttctataatctcttgcttctcaggagtcacatggccagaggtcctgagatttccagtcctgtgacccccacccagagatggacttagtgcatgaggaccattttccacacccctatgatttcatcctcaaacaatcagcagcaaccattccctagccccctgccttccaaattatccataaaaatcctagcctctgagttattagggagattgattaataatcccagtcctaccccttgggttgctctgatttaattaaaccttctctactgcaataccacggactcagtaaattggttttgtctgtgcaatgggcaagaagaacatgttgcatggttatacaggtactacaagcacagtctgatggcaaattattggttttgcttcctgcccttgatgtttctaaacatctagtccaaaattacttgtgaaaggtccagcaaagccaattttaaaagaggctatatggccaatcactattctttctacacattattgcaaataatcaggccacggctgggcacggtggctcatgcctgcaatcccagcactttgggaggctgaggcaggatcacctgaaatcaggagttcaagaccagcctaggcaacatgataaaaccctgtctctactaaaaatacaaaattagccaggcatggtggcatgcacctgtaatcccagctacttgggagactgagggaggagaatcacttgaacctgggaggcagagattgcagtgagctgagatcacaccactgcactccagcctgggcaatagagtgagactttgtctcaaataataataataataatcagaccaagtataatgaaattaaaatttattttgcaaataaattggtcctactacaatttatccttcatagaaatgtggaaactgaagataaaaaaaattaggtttcagaagaaaactatactacacctgttattagattctagccctaaacattgtttttgaggtttttattatttacctgcaatttggtctaaattctgaattatttcctgactacaagtatccaaggaataaatgggttttctttttctttatgatagttttagttggcttctaatgcaacaacaatttttattgtaatcctgtgtgcattctattcctactattcaaattattaatgttatagatctttcattgtagtacttctgaattaaccaaaatcacagtattctgaagatgattctacaaagcctgctgtttctacaaaggctgctgatgatttctacaaagcctgctgtagtgttgctgtggcctctgcttaaaaaagtagaaaacacattgatgcagcatgttcaccccaacctccctgcctaaaggctcagggaccatcttggaagaggaaggcgcgtgagattgtaagagccgaattagggggatggagtgtggagaataaggacacttcatcttggatgctcacctgccaaattgacttctgatgaaagccagctccagaaatgtgcctacagttactactttcacctaaaccctgcccttagtcaaatccttctcttcttctaagcaatcaacttcaattccttgtataacccacagtataaaagggcttttataccattctatcctattgcatgtaagccttgggtctgggaggtaacagtgtgggattccaccatctcatctccctgccacccaaacatgcctgctcttctttaagcaatattaaatgtttgtacttcagaaatttgatttgtcagcctcttcttcagactctcagcttctttggcctttgggagtaaatttgcataggcctgctcaaaacaggatgttctgggggtttgggggtgttgttttgttttgttttttgttttgtttagagacagggtctcactctgtcacccaggttggagtgcagtggtgcaatcatggcacactgcagcctcaaactcctaggctcaagcaatccccccaccttggcctcccaaagttctgggattacaagcataagccaccatgcccagccctggacttttctttaaagacatttacacagtgtaggaattactgtgggtgcactgctcaggtccccttctccaggatgctcattcctacctcatagatgattttcctgcagagatttgacctcagctgaagggcagtcacctggtccaggtggttgctattcacctccttcctgagaacagccaacagccagggacacgctagcacagagatataagagcgaccaaggtgaggccccttctgtgctgcggtgcatgctccagagcctccctgggatcagacttaagagggtctccagccagatctggtcttcgctgctttcctcgagctccccagcgcactcctgcaatgcatcttttttttttttttttttttttttgagacggagtttcactcttgttgcccaggctggaatgcaatggcgcaatctcagctcaccacaacctctgcctcgcgggttcaagtgattctccttcctcagcctcccaagtacctgggattacaggcatgcaccaccacgcccagctaattttgtatttttagtagaaacgggtttctccatgttggtcaggctggtttcgaactcctgacctcagttgatcctcctgcctcagccttccaaagtgctgggattacaggtgtgagccactgtgcctggcccaatgcacctcttgaatcacctcctcatgctttgcttttagagaacatgatccccaacatgtgattccagcaaagattctagaaagccaaccgtgacaatcacttctgggtttagatgacccccccccaccacaagatggcagtgagcacctcatcacagaggtgctgatggtctgcagcaccgcgccaggccagaacgtgccttttacagaagaaaataacccagtagctgactaggatggtgaggagggctggtgagcactgcggtagtgagagggacactagcatcactgagatgcaagtgatggtcatttttcataggtcaaagctcaaagcaggggacagttacagggcagggcttcatagcaccagtgtgatgaaagtatctgggagtggctaaggccagcactatgccatgggaagcaaggtgggcctgaggaggaggcagcagcgtcagcctgcaacaagtgggggctgccctgcagagacctaagagtcatgttatagagcacagtgtctgtaaggccaagaagtgtggacagccaagtgtgtcaattactagacatactcaagaggagcaggaagggcagggcatggtggctcatgcctgtaatcccagctacttgggagactgaggaaggagaatcgcttgaacccgggaggtgaaaattgcaatgagccgagatttcgccactgcactccagcctgtgtgatgggagcgggactccatctcaaaacaaaaaaagaaaaaggaaaaagaaaaaaagaaaaacctaggtatacttctcaagcaaataaaaataatcaaaaccaatatcatgcccgggcacaaatttcatatatataacagatttaaatatatgagggtgattatcctctcatatctccatttttttttgtttttccatttttttctttactaaaaaaagttaatgccaatgacacacaatttttttttttttttttttttttgagatggagtctcacttcttcgccctggctggagtgcaatggcgtgatctcgactcactgcaaagtctgcctcctgggttcaagcaattctcctgcctcagcctcccaagtagctgggaccacaggagtgagccaccacacccagctaatttttgtatttttaatagagacggggtttcaccatattggccaggctggtctcaaactcctgatctcaaataatctgcccgcctcggcctcccaagattctgggattataggcgttgagccactgcgccccgcctatgtatgattttttttttaattttattttcataagtttttggggaacaggtggtattttgttacatgagtaatttctttagttgtgatttgtgagattttggttcacccatcaactgagaagtatacactgaacccaatttgtggtcttttatccctcacccccttcccaccctttcccccggagtccctgaagtccattgtatcattcttatgcctttgcatcttcatagcttagctcttgaacccttactttctgtttgagggagaagacatatcatctacaagtagatactgtgtaaacattccattgcatgactatcccataacttatttattatttgtgtttggttatttgctgctatgtaacaaccccactcccaactaaatggtgtgacaattccatgattctgtggatcaaaaattctgaaaagtcaaacccaaggagttttgtctctgctccatgatgctaaagcctccgcaggggtgaggcgaatggctcagggtgactgaaaagctcagggttggaacagctggggatgaggcctctatgtataagatgattcttcactcacaggtctgaaactatggtggggacagccagaaggctcggctcagctgggacagtcacctgagccctacacatgacctctccaacatggtgatcctgaagcagttgggtttcttacacagcatcacacttttcttttttttttttttttttgagatgaaatattgctctatcacccaggctggagtgcagtggcacgatctcagctcactgcagcctccgcctaccaggttcaagcgattctcctgctccagcctcccaagttgctgggattgcaggcgcctgccaccaagcccagctaatttttgtatttttagtagagacggggtttcaccttgttggccaggctagtcttgacctcttgacctcaggcgatccgcctgcctcggcctcccaaagtgctgggattacaggcatgagccaccgcgcccggccaaagctcacacttcttatgattcagccttagatgtcacatcagttcattttccccacacttattagtgttagaagtcacaagcccacccatactcaggggactggcacacagaccccactctcaatggaaggggtgggacaccaccattcctgctgatgggcatttgggtaacttcctgtttgaagctattaagattgggctgctgtggccgggcgcagtggctcacgcctctaatcccagcactttgggaggccgaggcgggcggatcacgaagtcaggagatcgagaccatcctggctaacacggtgaaaccccgtctttactaaaaataccaaaaaaaaaaaaaattagctgggcatggtagcgggcgcctgtagtcccagctactcgggaggctgaggcaggagaacggcgtgaacccgggaggcggagcttgcagtgagccgagattgtgccactgcactccagcctaggcgacagagcaagactccgtctccaaaaaaaaaaaaaaagattgggctgctgtgactattctagtaggtgtctttggtgagcgcctacacgtgtttctctttttctctttagtatatgcccaggaggggaactgctggctcccagataccgtatgttcagggtcacacacacttccacagggttttccaaagcccttgtaccagcacgcactcccagcacctgtgtgactgctccagctgtcccacagtctcatcagttctattgctgatattttcattttagcttaagttatatttaataggaaaattaccgttgcctctgccccccgttcctgcctgtaggagtttctcgtagctgttgctacaggtggccacaaatctgtcacttaaacccacacaaattgatgtccttatggctttggagtcagaagtgtcaactgaaggtactagcagggctgtactgacctggtggcctcagggagcatctgtgctgcttctccaccttctagaggctgctgcatccctcgctccagccccttcctgacaccactcaccctcctacttctgttatcacatcctcaccttctctgtgttcagggctccctctgtctctctcttgcaagcacacttgggattccattgagggccacccacataacccaggagaatttctccacctcaatatccttaacaactgcagagcccttttgccataaaagttaccattcacgggttccagggattgtgacatgggtagctttaggagtgattattcctgcctgtctcccgctcaccagaacttggactttctctctcaacaggagccccctgtgtgggaatagcctgtctcaacgacgccctctataaggacctgcttcctcaaaggacctcatagtcgggtcctgcccctcagtgtccagtctgccttggctggaggggctgcaggggtgtgttggcgccacctggtggagacagggcatcacagcaggtgggagcccagtagaagcacaaccaaaacatgggtaatgtttaaaattttctggctaagcgctgtggctcacgcctgtaattccagcactttgggaggccgaggtgggtggatcacatgaggacgggagtttgagaccagcctggccaacatggtgaaacatcccctctactaaaaaatacagaaaaattagctggacatgtggcgcgctcctgtaatcccagctactcgagaggctgagacacgagaatcgcttcaaccccggaggggttgccgagatcgcgccactgcactccaggctgggcgatagagcgagactctgtctcaaaaaaaaaaaaagaagaggggaggcgaggggaggggaggggaaaagggggaatttgtttggagctgagacatccatcttctcctgacctcagatatttgcactcctggttatgaagccttcacacttggactgaatacaccaccagctttcccgatttccagcgtgcaaatggcagatcgtgagacttctcagcttccataattacatgagccaatttatatatataaattgggtcctccagaaaaacagaataaattatatatataattatacgcataacttaattaaattatacgtataacttagctatatatataatttattctgtttttctgaagaaccctactgacacaaatgttgagcatcttttcatgtgcttattggcttaataacttgtacatcttctttggggaaatgtctattcaagttctttgcccattttgtaactgaactattaatatttgtctttacattgttgagttgtaaaagttccttatatattctagatactagagccttatcagatatatttctgcaactattttctcctaatatataggttgtgtttttattttctttttctttttttttttattgagacagtctcactctgtcacccaggctggagtgcagtggcatgatcttggctcactgcagactcgacctgccaggctcaagcaattctcccacttcagcctcctgagtagctgaggttataggcacttgccatcgcacccagctaatttttgtattttttagtagagccgaggtttcgccatgttgcctaggttggtcttgaactccctgcctcaaagcgatctgtcagcctcagtctccctaagtgctggaagtacaggtgtgagccacagtgcccggccatctattttcaatagtgttttttgatgtacacaggtttggaattttgataatgttcaattcatccatttttttttttttttttttggttctttctactggaccaccactcttgagccctctaatccaacctccacgcggcagccagagggagctctctaaatgtaattactctttccctgctccacctgctcaaaacagtgtcacatttgtgatttaaaacagtatttctcaaacctaatttgcaaacaaagcaggtggaactcttcttgtatgcacagcatctgatttggttggtctggcatgggtctgggagtgagcacacctaccaagcggctgctggggtaacttgcgttttccactgatgatttcagcaatgtttccggtcccacatgctcctccagaaccttgtactcccccatgaaaaggtggagtccatttccccttcctttatttatttttttgagacgaagtttcactcttgttgcccaggctggagcgcaatggcgtgatctcagctcaccgcaacctccgcctcctgggttcaagcaatgcttctacctcagcctcccgagtagctgggattacaggtatgtgccaccacgcccagctaattttgtatttttagtagagacggggtttctccatgtcggccaggctggtctcaaactcccgacctcaggtgatccgcccgcctcagcctcccaaagtgctgggattacaggcgggagccaccgcgcccggctatttccccttcctttgaacctgatcaggacttgacgatggcatcaacatggtgagagtgaccctgcatggcttatgaggctgggttacacaaggcgatgttgcttctgactggctccctctcaggatacatgcccttggaacccatcctctaagctccttgggagcccaacttagcccatgtggagacaagacagggagagaaacagaggcacccccagccctcagccagcatcaaccgccagacaggagagcaaatgcgccaacaatgattccagctgaagcctcagacagcgtggagcagagatgagggatccctgcagattgcagatgcgtgagcaaaatgcatgctgtcactgttttgaaacaacaatgtctgggggctgtttgttatgcagcaatagacagctgtaacaatgctgttactgctgtattccatgaatgactgcactttgagtagcagggggctagatcactagataagccccatggcttctgtgtatgctatttttctacttttatatccttttcattcactttttttttttttttttttgagacagagtctcactctgttgcccaggtgggagtgcagtggtgcaatcttggcggactgcaacctccacttcccgggttcaagcaattattgtgcctcagcctcctgagtagctgcgactatagatgcacccccatgcctggctagtttccgtatttttagtagagacggggttttgccatgttggccaggctgatctcagactcctgacctcaggtgatccacccaccttggcctcccaaagtgctgggattacaggcgtgaaccactgcacccagcctcattcactttctttacttggctcatttttccttgttgcctcaattctcctctaagatcactttcctgacatttcagcctgggcctgttgccttctctgggtcccctccgcctcctgtgcctcccccatctcagccttgatccctcagattatacttcctctgtccccaccctgaccatcttggctgtccctggatagggatgggtatcttctcccactggtctgggagatctggaaggacaggcctggaaaagacttggtcactgctggaaggagctcagttagtgtggtgctgaggacagtacgggtgaggctggccccttcacccaaactcccactctcttccatagatttcacctctgtggcccaggccataggattagggcaactccccttaaacatcgagtccatcctccaagctgtccttttttttttttttttttttttttttgagacagagtctcgctctgttgcccaggctggagtgcagtggcgcgatctcggctcactgcaagctccacctccagggttcactccattctcctgcctcagcctcccgagtagctgggactacaggagcctgccaccacacccggctaattttttgtatttttagttgagacggggtttcaccgtgttagtcaggatggtctcgatctcctgacctcgtgatccgcccgcctcggcctcccaaagtgctgggattacaggcgtgagccatcgcgcccggcctcatgctgttcttgaatagtgagcacctgttacaagtcgccccaccagcctctcacttgtacccccctcatctctttctccccaagagacagaggaccctggcacttgtgaagcatgacccagaccctggggccatggcatccaacatcctcattccccatgacccctactgtctagatgtagctgccaagagacccccagactccccgggcctctgtctagagtgccaagacagagagagaatgccctgccgcttgcatgctttgtggggtgtccttcccccttccctggctgctaggcgtgacttcaacgttctccccaacccccaaacagcagcactgacaccagctgcagacctggctcaggttagctaatgaggaccaggctggggatggagcctgaacccctaaaccccagtcctgtaccccaccctaatcctggggtctccactggacaaaacgaagcagcttggtttttcgttgttattgtttttgagatagagtatctctctgtctcccaggttggagtgcagtggcgtgatctcagctcactgcagcctccgcctcccgggttcaagtgattcttgtgccgcagcctccccagtagctgggattacaggcgcgtgccaccacacccagctaatttttgtatttttagtagagacagggtttcaccatgttggccaggctggtctgaaactcctgacctcaagtgatttcccagcctcggcctcccaaagtggaagcggcttatttttaaggagaaaactcccgtggaaaggaatcagcacctcctctgtcaacatttcacttctctgaaaagactctcacttccaacagaaagtgctttgtaacacaacaatgaggctgggcgaggtggctcatgcctgtaatcccagcactttgggaagctgaggcgagtggatcacgaggtcagaagttcgagaccagcctgaccaatatggtgaaaccccgtctctactaaaaatacaaaaattagttccgtgtggtggcgtgagcctgtaatcccagctactcaggaggctgaggcaggagaatggcttgaacccaggagatggaggttgcaatgagccgagatcacgccactgcactccagcctgggcaacagagtgagactccgtctcaaaaaaaaaaaaaaaagaatgagaacatatggacacagggaggggaacaatacacacaaacaaaatttagaaacaggtgaaaataattttagtaatatttttactaatactgatatgctcaaaatattattatttcaataagtaatctaaaaattattgagatgtcttatgttcttttcatcatactaagcctttaatatttggtgtgtattttacactcacagcacatctcaatttgcagtccccatgtttcaagcactaaataaccatgtgtgtccggtggctaccatactggacagcgttgatctgaaatcgcatctgtatgcatcaccagcatatttgcagagatccccatctcagcagcacacctgaggctcatctgcgaaagcacctgcaacttctctacaacctcccacatcacctccaaacacatcctcatgtcatctgcaaacacacccatagctcacaggccaatgcctaaatatcattgcaggcaccttcagagaaagcacttactaaaggggtatacttgattccacatctgctttgacctgcaaatctcccttctcctttacatacatttgcatctcatttgtatgtcaatctaaatccactggcagagcctcagatcatcatctcaaagtcaggtggatgtggggctgggcaggcctccaggtgttcctcctcctgcttcctctggggctcttgatcctcctcctcttccttgctgctctcctcctcctcctccaatatggtgaccagttcctcccgcagcgcccccatctccagccccaggctgcacagctgtcccagcagctggacatccactcggcgcaggttcccctgccagtaggaaggggacgtcacagggatgccaccccagagagcaaggggtctctccaggacctgggtgagagcaggtcccaactcatgtcctggccacagcgcctgggcagggtcctcactgtgcccatggaccctaactgccttcctgcttctcagagtgtctcttgatctctaactcttctctttgtctctccatttcattgtccctgacttctctctctctgtctcctccctctcttatctatatctgtccctgtttccctttgtctctgtccccatttattttttgtctttccatgcccctgtctctctgtctttatgtgttgccatttctctgcccctgcctttggctctctttctctcgcttgccctctctctgccctccccaactttctcaaattcagtctgtctctccatctctgttcctgctctccgtctctgcttcccacctctgtccctctcttttgggatctccctgtccccacctctgttcccgtccctcactctatgtctgtctctcggtgtctgtacatgcctctcatgtctctgcttctatctctcagattctgtttttcgatctctggccttctctatttttgttcatttccattcattctcatttcctctctttctctttcccttccaaacccctcactcaccagctcctccctgatccacagcagactatcgcaggcacctccagtgtctgcccctgcagtcctgagggtctgaccagggatttccactggggagacctccctcagggcctgggggggtgggcccagccccggaggcaccagtccagcctgattcagctgcctccacagttccatcgtctctgagctatggctgcaaggagcaggaagtagcaaggtccagggtggcctggtcccctggggagctgtgtgcgtggtggagagtaaagggcagagggagtgggatgggggttcctgggaaaggtatcccaaagtccactcttcagagagaatcagctggccttgtgcttttctttttccttctgaagtctaacctcaactctgctcacagggttcaaacatagcctcttgcagaggtctaactccacccttccctgcctgtctcaggcctgacccctcaggggcgctcagtgtctgtagatgcctggcaccctctgtccttccacctgccccccaccaccacttctccagcctctcctcagcctccatttgacctctggcttgcccatagcttggtccttgcttgtcctcttggcacgggtcatcctagggctttcccaccagtgtgcctttgggggcaggaatggctcccaggggcaccaagacagcaatcccttagctggagtgcctgtgtccaggctgctggcctagggccaagcagccaattctgctgaccctggacttgcctatgggtatattatccctgttgagggtgagggcttctgctgtggaaaagtctgggaagcactgcaggcctctctcggccttggacccttccttcagacccaaggtgcatatatatacatatatataatggtagatcacgaggtcaggagatcaagaccatcctggccacatggtgaaaccccgtctctagtaaaacacaaaaaattagccgggcatgctgccgcgtgcctgtagtcccagctactcgggaggctgaggcaggagaatggtgtgaacccaggaggtggaggttgcagtaagccaagatcacgccactgcattccagcctggcgacagagcaagactccatcttaaaataaacaaatgaacaatatatatatatatgtattttgttttttgagacagagtctcgctctgtcatccaggctggactgcagtggtgcaatcttggctcactgcaacctccgcctcccgggttcaagcgattcccctgcctcagcctcctgaacagctggggttacaggtgcacgccaccacacctggcgaatttttgtatgtttagtggagacggggtttcaccatgttagccaggctggtctcaaacccctgacctcaggtgatctgcccacctcggcctcccaaagtgctgggattacaggcgtgagccaacgcgcccagccccaagtcccttttaccatagaaagtaacatagtcacagtgcccagggattcacaggtatggggagagggttcgttattcagctgccacacccaccttcctaaacctgctgcccttccagtttcctcacgtgcacagccacgcccgtctgcttttagtttctcaatctgttggcttaaccttcaaaacaggcccaggatttgagcacttctcaccattccctctgccccatccccattcatctcttgcctagactgctacagcagcctcttttactggtcccctgcatccacccttgccctctaaggcaagggtccccagtccctgggccaaggaccagtaccagcccctcgcctgctaggaactgggccgcacagcaagagatgagcagcgggtaagtgagcattaccgcctgagctccgcctcctgtcacatcagcagtggcattagattctcataggaggcaaaccctattgtgaactgtgcgtgcgggggatctaggttgcctgctccttatgagaatctaatgcctgatgatctcaggtggaacagtttcatcccaaaaccatccccaccccacccccgacccccagtctatggaaaaattgtcctccacgaaaccagtccctggtaacaaaacggttagggaccgctgctctaaggtacattctccacctggcagaaataatctttacaaaatgtaaatccgattttgacactcccttcttcccactgtgaatagaataaaaccctaccaggcctgcaccgtcagcccctgcccacctctcaacccagtctcctatctctgtctgcaagctggttcccacctcaaggcctctctgctctagaggctacctctccctgcagcgcttttcccctagatctttgaatggctctttccttatcattcacttctacttcaatgtcacctcttcagagaggcctttgctgatggccctacacccagtcacttttttttatctgcttctcatcaaaattgccttgctgattcctttgtttcttattcatcctctcccacatccatcctctcccagcccagaatgttgacttcctgagagagggactgggtctgtcctgctcaccatggtaacctcggcatctagaacagtgcctgccatcacgtggtaggtgctcagtaaatattcttggaactaatgaatgaataattctatccacaagacttcacaatggctcttcatgctgcgatctagctttcaactccaaactggtcttgagatctcacctcagtctctaaccttgacatctaacctcttcacccactctcttacctgaccctaatttttaaaaatgacgtggtcagcttttcagccccctcattccctgtttttaggaggtagtgagtggaagctggaagaataagaaagcttggggagactgcaattgcagtcaggaaagaaaggtactctgccgggaagaacaccccatcttctcctagggaaagattgtggagtcctggggtttgttttgtttttcaattttttgttttaagagacagcgtctcgctctgtcacccaggctggagtgcagtggcgcaatcacagctcactgcaacttcgacctccccggctcaagtgatccccccgcctcagcctcgtgagtagctgggaccacaggcgtgcaccaccacgcccggctaacattttattttttgtggatataaggttgccctatttctttgtggagataaaggctcccctatgttgcccaggctggtctcgaactcctggcttcaagcgatgctttcgcctcggcctccacaaagtgctgggttcacaggtgcgtgagcccgacctgtgtctcgttttgaagctcagggagagggcgctgtgagcaatccctaaaccctttaagagtaaaaagtgcgtgcacctttaagaggacggttagaaaacgcggggcgtggccacaggagaataagttcgcgctgaaccaggagcgtgggataagaccggccccttccggttacgaaaccttagcaagatggcggctccctgggcgtccctgcgcctggtcgcccccatgtggaatgggcgtatcaggggcatccatcgcctgggtgcggcagtggccccagagggcaatcagaagaagaaaaggacaatactccagttcctgaccaactatttctacgatgtggaggctctgagggattacttgctccaaagggagatgtacaaggtgcatgagaaaaatcggtttcgagacaaggagtggatcaggccagataagtatggccatttctctcaggagttctggaatttctgtgaagtgcctgtcgaagctgtggatgccggtgactgtgacatcaactacgagggcctggataacctccgaacctccgcaggctggacatctcggacctccctgccgtgtccaaccctggcctcactcagatattggtggaggagatgctgcccaattgcgaggttgtgggagtcgactgggctgagggcctgaagtcagggccggaggagcagcctcgggacacagccagccctgtccctgcctagcctttagccctgtccccactcacgtggcttctcagcgggctgcatggaatgtctggtagctcaccacacttctggcttccatttgtcttcactcaacgtcagggtgggggagtggtgctggccaatcacaggagagagcgtgagttcccagtatttattcctggctgcccttggctaaaggtcacagctcctgtcaccctgtcaggcagccctttccatgcccctgttcaggcctggggaggtaaaggctcaggctgttagtagccgcagagagccacactcaccttgtcaggagactcttctcaaactgtccttatgtgagtgcactgccatttcttgcagggaccctgactgacacaggggctactactgacactttacagggatggttctcccccgtgcagggccgctgtgcccactgcaggacatgcagcatccttcgccccactccactcactaaaggccagcgcaccccaggccccatagtattgctggttatggatttattgactttatgttccaaattcagctttttcagttggctgttttttgaaaggggataagctttgtcagtagagggcaccgaacaggcattataggaggaaaggcgcctccttcgtggttcttgttggcctccactgaggcacctctctgggaataacgttccccagcaccccaaatggatttccagtcaattcagaagcattttaccagtgaagccctcattattccagttcactgttaaagccagtaattctctatattaaactttccctgttcggtttatactccggagtataaaccgaacaggctatcagcacccctactagttctaaccacatgactcctcccccttatactaatagctagccaatcccacctatcaaaagaaaccacaacccgaaaaaaactatatattaccatactaatcctactacaactattcctaattataaccttcaccgccacc

SEQ ID NO: 735338 - DNA, 188013 bp, Homo sapiens
ctccaaggctgagggatgaggagacctgctgaggacccagggccttatctttccatcccactccataggtcccagtattgactgatgctgtcttcacctcctagcctcacttttaaccttctggcacccgcccaccactgtccagttcactattgaagccctgccgtccagtgctgcagagggaaaggatgttcttctactggcctgcaatatttcagaaactattcaagcctattattggcacaaggggaaaacggcagaagggagccctctcattgctggttatataacagacattcaagcaaatatcccaggggccgcatacagtggtcgagagacagtataccccaatggatccctgctgttccaaaacatcaccctggaggacgcaggatcctacaccctacgaaccataaatgccagttacgactctgaccaagcaactggccagctccacgtacaccgtgagtgattcccccatacctctgggtgctggcggtcagttctgcttcacacacatgagattgtcaggcctgggctgtgcctgcatccccctctgcattttgtcccgtgttgagatttgggcatttagtgcaggacacacacatggtaggtaaacttcaacagatcagaattcctttcctgcatccaggccctgcagacactgatggcgggggcgggggggcctcagcagggggaggtcagtctcagccaagcaccccatgccctccccatgaacctgaccctgagaaagaccctggagaactgggtcagggcctggcctgagggcgtcctgggaacctcacaaaagcccagcctcaggactcctgactccgtgtgaccccgggaagcctgtgtcagggctggggtgtggtctcctgggcagggcttactgggagcaaggatttaccagatgtctgcgggctgtggttcctgaagcttctcatcagtgagggctcagctcccagagtctcatctagacaaggacagagcctaccactttccctgggactcagcctggagagggcagggggacaggattactagggcattggccccctgaatgaggagcttaagagatgcccttgggcagtcagtggcccaggggtaggaacagaggggagaaaatgttcctggcagcttcttgtccaccggggatcatgcccaggggtgctctcccatggaggcaaataacagatgctgttgatgtgaacacctcctctgtgccaagcttcatgtcagatcctgtgaataatttaaagttcattcacagacaaagtggcaagcctcagaccattttccatttacatattgtatggaggggaaactgaggcacagagagatacagacaccggccacggtgggcagatcgcagctggcagagtcacatgagggctgtctgcagctgctgccacgtcctctccttcatccctggtgccttactaggtgtctgtggaccttagaacagccactggttcggatgttttcttcttaggtgtctacagctcggagggggagattctggtctggagagttatgagtaaatacagaattaatcagttttttcttaactaaatcacctgcctcaacaatcagtcagtgctggggaagttcaggcctcctcgctcaggtccacaccccgcatctctggacatgaaatggcttcgtgtgttttctgatgtgtgggtatcattccaacaggaggataaaggggaggactttgctttctctccccattcacaccctgcaccagccagggcccagtgtgagacacatactccgtagttctctcatgaaggagggagggaatgaatgaaggaatgatctataacctcttcagagacagagacctggatacaagatcctaggaggttctgggcccaacgtgagacacacactctgtagttctcttatgaaggagggagggattgaatgtaggaatgatctataacctcttcagagacagagatgtggatacaagatcctaggaggttctggccacacctgttttctgtccctctagagcctaagacccatgtctcattcatctggcccgtttctcctaaatctgcccctgggagctgagtctcatctgaccctggggctgcagggctgtgggaaggttttcaggggagggatcaggcttgcgggtagtcccacacgtttgccttacaccctggagctctacctggttctcactatgaatatcccataataatcccccctatcctttctggggagtagaaaaaaagtaaatatttaaaaatatgccagagcatctgttcttcttagcaagttcagatagttattagttagcaggaataaatcgttattttaccagagcctcacctgctgggggtttatgggagcctaactgactgaggggggtgggaaatatccaactccagccccctctagccatcatgtcccacctaaaggagagaaaaaactgagaggcacttgtgacattcacagcccagggcacagactctatccaggaccacagaacccctccctccccccactcaccaccgcatcactgaacgcctgctcacccaagttcctgttgcccagtacatcatgtcctggctttcaacaaaaactacaagacagactagaggcaaaaaaaaaaaaaaaaaaaatgcagttcgaaagacagaacaagcatcagaaccagatgcagatgtggcagggatgtggcagggatgttgaaattatcagaccaggaatttaaaacaactctggggccaggagcggtggctcatgcctgtaatcccagcatttgggaggccgaggcaggcagatcacctgaggtcaggagttcgataccagcctggccaacatggcaaaaccccgtctctactaaaaatacaaaaaattaggcaggcatggtggtgggtgcctgtaatcctagatactcggaaggctgaggcaggagaattgcttgaacctgtgaagcggaggttgcggtgagcctagattgtgccactgcactccagcctgggcaacagagcgagattccatctctaaaacaaacaaacaaaaaacaatactggctaatatgctaaaggctgcaatggaaagcatagacaatgtgcagaacagacggatgctgtgagcagagagatggacaggctaagaaagaataacaacagctactatatctatctatctatctatctatctatctatctatctatctatctatctatatatatgtatatatatgctagagatcaaactcactgtaacacctggatctcagagtggttgtgaggatgtttattaggagattaaagagattaaagcagagttatacacagggcgagagctcaactgatgctatcaactagtattcttatttttttgatgttgttattggcaataaaatcaggaacaatgcagtaaaaatttggttttatcatgtacgagttctgtgaccttccttgacttactgaggtactgtaagtctcagattctaactctgcagatggcggtgatgcccctctccctcaaggtgatgtgaggatgagatgagctgtaggtaggttggtgcccactgtgcctggcacatggaaggcccctgaaaatagtcaatgaacatcatccccgctcatcagcatggagttgacagtgagggctcgctctctgtgacaatcatggaatggaaaagaagaaacaagaggaagactgggcgcagtggctcatgcctgtaatcccagcactttgggaggccgaggcgggcagatcatctgaggtcaggagttcaagaccagcctggacaacatggcgaaatttcatctctactaaaaatataaaaattagcctggcatggtggcacaaacctgtaatcccagctacttgggaggctgaggcaagagaatcgcttgaacttgggagatggaggttgcagtgagccgagattgcgtcagtgcactccagtctgggtgacagagcaagactccatccaaaaaaaaaagaaaaagaaaaaagcaacagagggaagaggtgtgacatgagaggaagaagggatttaaaggtacaggagcagggcgaggtgcaagcacctgtgggagaatgtaggagttggtacatcccagtgtgtcaagtctgagacacagaaaatggtgcaaccgtggagagcaagggagtcagctatgaggacagcccaacagaccacactcaggctctggagcatttccttcctccctgactatgcccctgccctgcaatgccccttatggtttcccttggaacaaacttgggccttgtcccctttgccttcccctttctgcagaaaacaacgtcccaggccttcctgtgggggccgtcgctggcatcgtgactggggtcctggttggggtggctctggtggccgccctggtgtgttttctgcttctctccaggactggaaggtaccgcagcttttccccagcctcctcccacccctaggctgaccccagtcagggaggagggagaccccgccctgtattcagggccaggctttccgcatcctcccaaggaatccttccctctcattccatggctcctcccttgccagctgctgatcctaggctgcctcttcctttatgaatgtggcacagttaaggttgcacccctgagtgctgtcctagttccctaacacagcaaagccacagctgcctggagggaggaagggagggagggagggagggagataagacgggagtgctcagaacctggtaccttctgctgttcattgaatttacccacccagtgaggagggatttgcaggcttgagatccatggtgggggtcctgggcatggtcacgcagtggggagtggcaaagcctggacaggctgggtagggtcagcaccccatcgtgattgatgtccctgaggtgtgagatgggagaacctggacctcaggacctgctgtcctttatgtctcttgccaaggggtggagagagagaggacaaggccattgccccatttcagcatctccaggcctgaaaggagggtctggccatggcagggatactgagttctgggagaatatgatacatgctccttgcctccccatgcccccagctcccccagtgtcctgcacacacagccggccctgctttccctctggggccttgacccttcctctcaggcaaacgcaggtggtctgattccctccctgagtcctcagtccctttcctgggtccctgggtcaatgttctcctcacccggcatctgcctgggggggtccttcctctctggccaggacagacgtgactgcttaaggcctatcctcagctccccgtcctcggccgctcctaccacgaaactgatggagacaggaggccttcactccagtccttgaaaatggagtcccttccttgtcctttattctgcccctaaacctgtgatttctccctgcaccctcatgaataatcctgacctttcctagggccagcatccagcgtgacctcagggagcagccgcccccagcctccacccctggtgagtgtcccttcagcccaggtgtgggagcccctaggcctgccctacggtgtccactcctgccagtcaccccctgggggcctctgaccctttctttggggctgcaaggaggatgtcaggaaacatgacacaggggaccccgactgtcttgttcagactgatctgtgggctctgggtcgtgggtcacctcctcgacctcagctgctcaggtctcccctgggaagaggctccctctccctgattctctgggagctgaggacccctacactctcctgcaggaggggcccaggctctcctcccaccctgctgctcactcctgtctctgtccccaggccatggtccctctcacagatccaccttctcggtaagcctgttccctccccagcccttttctactggggtcccaacagtgcaggctcagggcagggggaccatcaaccccacagcacagcactgacccacctttccccagaacagtcaggtcaaagtgagtgcctccagccaggatccgggcctctctacagggccaggaccacccacgccatgtgctgacccctccccgggaccctctacacctgaggagaaccctggagtccagcaggtgcagaatggacactgggaccatcagtcagaggcccacattaacaagggtgcggggtgggcccagccaggacaggggtcagggtgttgtgtccacactgggaggctgagctcaggggcagagctggtcaatcctgaggggaaatgagtggaagtggaggcagggaagtaagtcctggccgatcagagacaggaaccttccaggctgggcttccgtgaccctccctccctgtcccctgacatctcctctctcccctgcccaggcccctctacccagccccagaacagccactcccatctatgaggtgagtgtgggccatggatgttctggtcccgcaggctccaggggacccaggatctgcccccaccagcacctggctgagctcagattcaggaaaatgcagtgaaaatgagaacaggtggtggtgagcagaggagggaggggcctgggaacagggaccccctgagcacagccaggttcagccccagagaagccctgggtgggcccagagcctgggagatgccagacactgttctgagaaggctacaggggttgaggcctcttctctgtttttacaggaattgctatactctgatgcaaacatttactgccagatcgaccacaaagcagatgtggtctcttaggttcctctgggagctgctcttgtgggttgatggagcgtccccaaagctcccagccctggggacggggaaggacatggagcctgagccagagaaccagctctgagtcctgaggagacacaggcctggggacagggagggatgggagtccctgctgaatatctggagaccctgacaggttgccctgggctctgggtgggccgggacaaaggcctctcatcaccacaggaagcgggggcttgcaaggaaagtgaatgggcctgtggcccacccggggtcaccaggaaaggatctgaataaagaggacccttcctctcattggctctttttctgctcacgggaacttagcagaaactcacctgaaactccgtgtccattctctcccgggtcacacagggaaaatatctccaccttgtctcaaccacagtctctcttccctgggaggcagaaataggggttgggagtcaggctggggtgggccctacacaggaaagggcaagattcacatgagccctgcccagccagccgagcgctcagctgtcctcacactaccccagggaccaaggccatgcacagccccagcctgggtccctctgtgaatgcatgtggggtctcaggagcacagaagatggggccatctgatgtccacaaaaggtgagcaatgcgggagcaaccatgggtggtataggttgcggctgtggcccctacgcagcctccagtgtcctgacccctgctgccctcttcacccaggccctggaggcccagtctatcactgtcctccacaaatgaacttacctgtccccaaatccaggatcctgtgtgcttatacctggccactaggttctcctctgtcccagtggctactgctcaggacatctttatccctggtggggcacagagaggggctgtcagagcaaccaagattaatacagacgcataattcagtccttgagcactacccaggactctggcccctcattgctcatcagttcccactttaccccctggcatggatctcactgagcaagccaactctttacacaggagcatccaggtcagaggtgcaggactcccccatctaaagctcatgcaggctcccatggcgatgggacaacctgtctgctcctctccctggcccacagccctatctcgcctgcagctcctccacacacctgggacagcagttctcagcccttccctgagggcccctggaagggtgatgatctcatataggttcacttgaaccaggtgccaccttcccacaagtgagctggtgcctgcactaaagcacagagccacagttcccaagagtgttctgccactgccacaggtcccaagagtgttctgccactgccacaggttgttcgtcctgagatgagaggtaagaaaacaacccgcaatgggttgttttatatcgggatttgcatcaggatttagctctaaatgacccctgatcccacctgcacacagcgtcagatgagacaaggtgaggcctctttagttttctgttgaggctgtgacaaattaccacaagcttagtgacatagaaacctgaaccaaagtgcccacatggctgtgttctttctagaggctccagggaagagtgcatttcctctccttttccacctcctagaggcctcctgcaaccttggctgtgtcctctttctccatcttcaaagccagcagcacagcatcttgaaactattctgtgccctgcttccatccccacatctccacctcctcccacctccctctctcacttaaaaggaaggagccttgtggttattttggacgcacctgggataaaccacaacaacctccccatctcatgatccttcctttaatctgtaaagtgtcctttaccacgtgacatgtccacagatctggggatgaggatgtacacatctttgagaggcccttgttctgtccatcactcctctcaaggccatcttctcatcatcgttcactacaaactacacatgggcacctggatgggttcatcatgactgtggcgtcagttcctgcattaacatccccagcaccctccagatcctgagagagggagacggagggctctccatgcccctagtacctctccaccttcttcttggtgacatgcttagttgctaagaataacagaaagcggaggtgactgaaagatcacaactcaccggcccttcaatagttcgtggacatcagcaccacggacagtgactcagtgaggctaatttccaggtggcagcagggagcatgcagataggagggaactgcaggaaaagctgcccattctattctatatgagaaagagtgtaagaaagaggaagctattacagggataatgctattcttctctaatccataaattgcgaaacctttgcatgtctggatatcatggtttttagcacatctgctgccactccctgcagggctgattgctgcatccaggatgtggtctcttggggggctcacagcctgctttggcctcatggtgagtctccctgcccctgacactcaggccactgtctctgcctacaacatggtgggaaccttccatgattaacgtctgattctctgtgcctgacctttgaagcacatccatcactcagcctggagcatccgctgagctcagcatcctgctcctccatccccagctgagcccttgaggagatgcttgagaggatctcctgggctcctctgtgagctcctccaggctgagccttgtgcttggtgtcagaggcctttgccatctgcttgttctttccataggcaaataatcctcctcagggacaagtggggcctgaagatctgtctgaatatctatctatctatctatctatctatctatctatctatctatctatcatctatctatatgtatgtatatatgagaatgctttattaggcaaaactgcatactatgaacatgctttaaaatgcaacaggatgagatgtgaagacataaagaacaagtgtgtagtgacacatggctatcagaacacactgaagaatccacaccgcggccgagagcagtggctcacgcctgtagtcccagcacttttggaggctgaggcaggcagatcacttgaggacaggtgttcgagaccagcctgaccaacatggtgaaaccccatctctactaaaaatacaaaaaatttagccgggcctggtggctcatgcctgtagtcctggctgttcgggaggctgaggcaggagaattgcctgaacctgggagacacaagttgcagtgagctgagatcgcaccactgcactccagcctgggagatagagtgaggctccatctaaaaacaaaacaaaacaaaaagaatccacactgcttccccgcttcactttacccagaaaaggaatgttctaggccacttcctcttcagcacacatccccagggaactaaaataggttcacagtcacccccatcttcctcattcccatcacctcttacccacagaggcatctctggtcctacagatccagccctgccttcaagaggcacaggtccaacccatccagtgtccctgctagtcacacacagcactcagggtacaatggagggcttctgtgctttggatgggaacaaaccccacctcacattcccacacctgagaagccaccagggtcctctctgtcctgtcctcacactcaatgtctgtcctgggtcacccttgtcatctctcctggaaataggcatggctcctgacaggtaggattgaggctttgtcttttcaggagtccctcccactctgagcacatgaaactgctcagctccatgcaaccctctctcaccaggggccttgttctctgggtccctgaatacctgggtccatgccatgtacattttaagaaaaatgacagtgactctcaccctgacatcctcacccaaggcacgtgtctgacaagaatcaccaggtgagatacctgtggctccacacacctgaggcttcactgcgcaggggtgtcctcatccctctcctcccacccctagggacagtaagcaccacaggctgccttggaccaccagctccccctcccagacacagcctcagatctatactgacatgctacatggagaggctctgatgaacagcaggtattaggaaatcccaccgaaccaggtgccacttgcggccccactcctcctcatatctgtgactgggacagacacacataacacacctctgttcaccgcccagcccccaaggtcaatcacagtctgcttctcccctagatccactgctccccatgtcttccgtcctcagctgcatcctgggtggcctccttgctgttcttgtaccccagaggcaggttccaacctttgtgatgttgcctgcaatgcccaaactttcccttccccttccccttcccttttcccctcccccttcccctccccttcccctccccacccctatcccttcgtcttcccttgtcttcccttcccttccctataaagccaaacatacccatccacctaccttgtggtcaaagtcatcagcctcctgctccactcagtgttctctgaccctgcatatggaggtggtggcccctcctagaacacccaccactcactgtcagccttgcgtggtaatcacagattttgcaggggttacctgtgttcaggtgtgtcacctgtggaaccagaactcttggaaggactggcagagggagctgcttaggatatctcagggctcctggcatctggtctaccacagggctattaacaacagcacttagggacaaggtggaggatggacggttaagagggtaaatatggatgatgtgtgggcaaagaataggacacaggaacacatgcagtactcaaataattatgccaagaaaggtgaggacatggagatggacattcccatatacttctgatgggactgcagtttagtccctacagcaacattgacctcatcatgtttaacgcgcacacgctctgaccactatcctacttctgaaggcctccctgtgctgtgagctctgagaaggccaagcttgcctgttctgtctctgctaaagccagagaccagccaatagcccagcacagggtacttcataaatacatgttgaaggaatgagctccaggaacagtactccacatggtagagatgtgtgtatgaggatgttcactgcagaaggtcatgtcaatgtgacaagtgacgagcagcctcaaatccagcaacaggggtgtgggtaaaagatcatagtgtagccatgcaatggaaccaatgaaaaaaccacaattagagcaaatccacatgtattaataaaggaggtgccctccatacatgctgcacctaacagaatgttgccaaataagaatgaaaaatgatgatatttgggctgtaaaaactagaagtcagctaaataagaatgcatcgaaagtatttgtgaatgcttacaattttataatgccttggcatccgttttggatggaagttggactttctcataccagaagcagggctcagtcacctttgaaatagtttccagttctccacctccttccagttcctcagtgtgattgatcagatatctgatttatacaactgcctcctggtgacctcctccctatgggacttccggatacagcccgtatgactgccccactgaccccacaccctgcctgctgcagtgaccacctctaattacctggatctcatgtctgcttgcattaaatccaccaattaaaactccctgaggacaatctgtttgaataatattctgtaccctaataaaggccttgacccatgggttccccctctgtcctccccatactgcccctgacctctgtgtgtgtgtgtgggtgtgggtgtatgtgtgtgtgtgtgtgtgtgtcctccagacagggcctgtatcccccaggacctgtaagtaataaatctttattttcatcttatgtctctcgcaatcattggcaagagctctgcatcttaaagatcgcaaatttaagaaattggtgtagtcggcacaatagagtacctcttctgtttagcacaagatatctcggagctgctgaggcttttaacatcctcgccggtgtggctgcctcactggtgaggccgttctgttcagtgcaattcagttgctccactgtgtgctgctgtgttgctgctgtagagtgctgccatgttgttctccccaaattgttaccgagtaggaacctgtaatgtgctcccaaggtggtctaccccatgagaagggggattctccatctagggcaagggctaggtgtgtttctggaatcctaatagggaaggcatccacagagggtgaactccactcctccttagagtgaggagtgacatttcccatttattttccccatggaggtgccatgtattgactttttctttcactgtcccaaggttgagccaaggtgagctatggagaccagggcaagataccatttctgttagcaaagcaaatgggtgacaacgtgtggagaagctgtggttctcctgatggatatagcagagtgccatttagtaaaatcttgtcaggaggctgcccctggttagaccggcagtgtctgtagtcactaaggtggatgcgaattttaggccctgggccatggataatccctgcagacacagccgtggcttcatgtgatggggcaatcccgggctagtggctcccttgtttctgcatttcttgctgtggttgcacaatcaacacctcaggggttgattgggtcaccttggaaagagaaacagctgcctaggaggctggtgcacatggaggccaccctcaattttattctgctaacaagttgtaagattaaaacaacagggggctttgggtaccatcaggaacttgtcaagtaaacatccaaagacagaaagaagaaaaagaaaaagacattaaccgtctagaaatacaagccattttaaagattttgcttaaaagatgcgcttgggctgggagcggtggctcacacctgtaatcccagcactttgggaggccaaggtgggtggatcgactgaggtcaggagttcaagaccagcctgaccaacatggtgaaacctcgcctctactaaaaatacaaaaaattagcagggcatggtggcaggtgcctgtaatcccagctacttgggtggagaatcgcttgaacccgggaggcagagacggcagtgagccaagatcgcaccactgtactccagtctgggcgacagagtgagacttcatctcaaaaaaaaaaaaaaaaaaaaaaaaaagacgggcttgtttcgtcgttgtggagtcatcccagagagaggctactccctagagtcactgaccacctttcctcctccatcttttcctcttatcattctagagacagaaaacaagaatctcagctttaggtggctaacctcaccccccaagaaaagaaactaccactttgattgactacaaatccaagaaaaataaaagagaaactttaaaaagtactgagcaaaccacaggtctagcaaacataatgctagccctaggttacttattcatttacaacaaacccctagatataggaggaaaaaataaaaggtaattaaatatatacacatacaatattttaatataaatatataataaatagttaaattatgtatgtataatatgtaactaaatcaaagtaaaatttcatactttgattctattggaaattcaaaattcatttattaacttatatattaaggaatttatgtaaaaaaagatttttaaaagggcaccaatttgcttttgtgtctctacaacataggatctaatttaactttacatttgctaaatacactaattgacaaatattcatggatttaatcaatactggggctcaaattgtagccacacgtgggaatcccataaatttaaacactctgtccctattatcttgagaagaaaactaaatataaaattgaaaaaaacaggtatgtctcaatttacctgtaactttgcctaaatttcccggagtcatatacccattgctgtaaaacattctctattggacataggtgctctgagacaataaataaaatagaagtgtttttggtacttagacattggcttgacaaaatgggatcccatgaaacctcagttaagatagtgaatacggcccaatgtgagttgaaatggggcctttaaggattaaaacttattacatgaaacctagtaagtaatggggtgattatccatactgcttctccatttcatagcccaattttgacagttgtcaaatctggaaaaaacaaacaaacaaacaaaaaaacccctgggaatctgttgcctcacagagacacaaagtagacatcaaaattgtatatctcagttccagttccaaaatggtggcatagaagcaagctggctttactccttcacacagaaaaccaaaaacaaatatacagcaccaaaattattaccagatatattccagaactcaaatatgaaaatgaaacagttttcagagccacagagaagtgaaaaaaactcccgacagatgacaaaagaatcagatttccccatctgtaatgtccctccctgccccattctgcctggtaccaggtgtgtggaaaattttaccccaactcatggtttctacactgggaaatgtaagatcaatgcgggcaaccagtttctgcacaatcctgggttccctgtccctgccttaacccacaagaagcattgtgagtgcccgaagggagaaatttccctgaggacagtcaaagagtggggaggcaggactaccatctccttccctggaaactctgctgtgtaactcagccaagggagacatgaaatcagactggtgtttcagcagctccatgttgtagtaggtttgtttcacaggtatcctgggcatggacatctagccagctttcccacactgccaggatatcccctttgggacctccctcagttaggaagggcacactctgatcatttactagggccaaggtaaaccctaaaggtaacttagagatgaaaaggaggtagtgacctagcagtaaagaactctaagaaaatctatccaataaaaatcaaaacaagccagacaaagactaaaataaataatgaatccttcaatgtaaagacctggacttacatccacaagaaacagtaagcaggtaaccatgatctccccacatggacaaagtgaggaacaagtgactgatcctgatgagatggtgatgtgtgagctctctaatcaagaattcaaaactgcagttttaaggaaactcaatgatcttcaagaaaacatggaaaagcagttcagaaatttatcagagaaatttaacgaagggattgaaataatttaaagaaaacaaacaggaatcttggaattgagaaatatatttgctgaacaggaaaatttattagagtctctcaacagcagaatggatcagaggaaagaatcaacccaaataagactcccccaaggcataaaataatcgaattctcaaaagtcaagggcaaagagaagattttaaaacagaaagagaaaagaagcaaatggcataaagaagctccaattctgtggcaacagattttcagtggaaatcatacagaccaggagggagtgacatgacattctcaaaatgctgaaaaaatattgacatttgagaatactttatccagtgaagttatccttcaatataaaggagagagaaagtttcctagacaaacaaaagctgagataattcacaccatcagactagtcttcctgtaaatactaaagggtaaatactaaatacttcaatgtgaaagtaaaaaaaaaaacactaacatgcaaaacaaccacaacaacaataacaacatttgaaggtataaaatccactggtgaaattaagtacgtagacaaacccagaatactcaaatagtaattgtggaaagtaatccaatcataactctagcatgagtctcaaaatataaatctatcaaaaacaataatacattttaggaggccaaggttggcagattccttgaggtcaagagttcaagaccagcctggtcaaaatggtgaaaccccatctctaccaaaaaatacaaaaatttgcagggtatggtagcacatgcctgtcgtttcagctatttgggaggctgaggcaggagaattgcttgaacccaggaggtggaggttgcagtgagctgagattgcactactgcactccagcctgggtgacagagggagactctgtcttaaaaaaaaatagctacctgtttggagaaaggtaatataaaatatgtaaatagagacaaagtcaaaatttgcaaaggatgaaattaaagagtagagtttttttggggggttttctgtttctattattttatttgtgatctaagataagttgttaccttttcttctcttgaagatactttgttatatctatgtttttggaagtcttatggtaactgcaacgcaaaaaatctatgatagatccactgaaaataaaaaacaatgacttaaaacatactaccagagacaatcaaccacaaggaagacagtaaaaaatgaagaaaggaagaggggagttacaaaacaaccagaaaacaggcaacaaagtggcagtagtaagttcttacttaaaaatattgaacactgaatataaatggactctattctccaattaaaaggcatagagtggctgaatgctgcctatatgctgcctacaagaaaccacttcatgtaaaaagatacaaatagactgaaagtgaagggggtggaaaaagatatttcatgcaagtggaaaccaaaagagagcaggagtagctatactgatatgagataaactacaaatcaaagactataaaaagagacaaagaaagtcactatgtaatgataaagcgctcagttcagcaagaggagatgccaattataaatatctatgcatccaacacttgagctcccaagtctcccaagtatttaaagcaaacaatagtggatctaaaaggagagatagactgaatacaatattaattaggggactttaacaccctgctctcagcaatggccagatctttcagacagaaaatcaacaaggaaacttcaaagttaaactacacactagatcaaataggcctaactggcatttacgggacatttcactaactatctaactgttacagaattcacattattttcatcagcacatagaacattcttcagaacagaccacatcttaagtcccaaaaccagtcagaataaattcaaaaaagtttatatcacatcaagcatttgttctgaccacaatggaataaaactacaataaatgaataactttctggacacatacaacctaccaagatggaagcatgaaaaggcagaaaaacccaacaaaccaacatgaaactgtaacaaaaggaaaacccaggaccgaatgacttcactgctgaattctaccaaacatttaataagaactaaaaccaattctactcaaaatgctttaaaaaattgaagaggatggaacactttcaaactcattctacaaggtcagcattatcctgataccaaaaccagacaaggacaggacaaaaacaaacaaacaaacaaacaaacaaacaaacaaaaaaacactacaggattgcttgaggccaggagtttgagatcagcctgggcaacatagtcagaaccaatctcttaaaaaaaaaaaaaaagaaaaaaattagccaggcatggtggcatgtgcctttagtcctagctactcgggaggctgaggtgagaggaccaattgagcccaggaggttgaggccgcagtgagccatgtttgtgtcactgtactccagcctggggaacagagcaagatgctctctcaaaaacaaaaagcaagctgggtgtggtggctcctgcctgtaatcacagcactttggaaggctgaggtgggagaactgcttaagcccaggagttcaagaccagtctggacaacatagggggactccatctctcaaaaacaaccaaccaaaacaaagccaaaaaagaacataggccaacatcactaacaaacatagatgtaaaagtcctcaataaaatattaacaaaccatgtttagaaacacatcaaaagagatcattcactatgattaagtgagattcatcccagggatgccagtatggctcaacatatgcaaatcaataaatgtgatccatcacattaaagagaaccaagaacaaaaaccatataatcactccagcaagtgcagaaaaggcatttaataaaagaatgggttgagggagtggagcccatagtcagagcagcagtggtctgggattttggaagtagaaagaagggcagcaccactggccaggaccaccagggaacacccccataggccctgggtgttgtgctccagggagggttccctctggagttattaatcttggtgtccactttgcccagctgcccctcacagggtcagggaggatgaagggaaagcttccttctaatgaaagttcagggactcacagttcctagagcctgtagggagaggaagatcttcgaggaagagcacctgggcattggggcgtttgagaggaagatctatgccaggtccaagtggacaacctgtggactctctctccagggacatacgggtatctgggaatctcctgtagcttaaagaggtaaagacctctccctttagcctgaggactggaggatgctggttcaggtgaatgagtcctgcaggggctggtacaggcctggagggtggtggtgtccagggccttgggttcacccttagcatgattcaggccgggcggtgtttcacatgagcaagagggcctgggttcattgcttcaggacaatggtgaaatctcatggtggaagaaatcttgtccttgccagtgcccagctttcatttggtcttggcccagagtgtcctccctagagaagactcttgtcccttcttcacactgcccttcagggatatgccagccttatgggataagatggggtggagactgtagatgtgggtgggaatctctccacagagtgctccttctctcagcggttgcaccttgtctcagggcttcagcttgaaatctgggatctccaagcccttccctccccagtcctggccaggaccacatgggcagatgcattgtgtgaagtgcatttcatttggggtgtcctctctgcatggcaccctcccgttgattctctttgcgcatgtcagagtgcaggcaccatccacacctcctgctggaggagggacggagctgttgactcctgagagctgatcatgtgttcccaccctcacacacaatcatggtccatcctctgagggacatgtgttgccaccactgtggagatggtgcaactgacagtaacaaacagtaaaatctggtactgaatgggaccttaagccaacaatgacaatgtcattccaaggtgtttcatttttattgattcaatgcaagtcacctgatttcattgactattcacaatagctcgataaagtaaatgcatcatcaccaccactttaaagaggaaaaaggtgcttgggcagtttgtgactactgtggtggctgctgcattgctctctggtaaagccaagtaggtggtgggtgcggcctctgggctgggatgatccaccctcctggtggtggcaggggagccaagctggagccatggcctgtgcagtggtagcagctgaactgaccgctgctgcaggatttgcaagctgttacattttgcgaagccatgaagcacataaaacctcaagtagaacaagtgtttcaaagtctaccaaaatctgccttcagagattattactacagaggtggatatgaacccaaaatgacaaaacgggaagcagcattaatactagataatgaatgaacactagtaatagtagggtaagccctactgccaataaagaaaaaaataagagatgctcattaacatgttatgctcttaaatcacgcagacaaaagagggtctccttatatagtagccacaatcaatgaagctaaagatttactgcaagatcaagctaaaaacagtaggtgtataatgaatttttaacttcatattagtttatgtatatgaatatcaagtttttataataaaatgcctccaaacaaagaatatttgatttagggtttaataacttctaagaggggactcagatgtttcctgtttcacagtcagtctgagagggtcatttttcctggagctgacctgggtggaggcctcacactgatactccccagcatcctctctcctgatggggtttatgctgagcatacagtggccctgggacagctccattctctccatgagtcacagacgctggtcatggaagatccactggataaggttccagagtcatctgtggggcaggtcaggatcacaacatccttttcttctgtgactctggtgttgctgactcagatggggtcggagccactgaccctgtggacaatcagtggaggtgctcaactgaaagtgggctgagggcacgtcttctcctccatccctgggtccttaaggtaactgtggaccccagaccaactgacacaggagctagaaagaaattatttaggaagttagtgagggtaagagcgtccttggcaaggtttcccctttaacaaaaagcagcccaagataattccttttctaacaaagagcagcctgaaaaattgagctacagatgtagatgagcaagatggaagcttgcacaggtgaattccagtaggtgtgccaatagaaaagggctgcctggaagccaggtatgttcaacatggagactccatcctcccttttctccattaccacatgtacagtaaaaaaccaggcaacatggcaccggccaggtagacaatccatctgcatgacaaaagatcagagtggggcagccagcaaatggcacagctggtctaaacaatctttcaccccctgtataaatcagacactgcctcctgaagctcatctataaaaccttctgcatttcactatggaagtggcaacccattttccccaggacccctctctctgtgcagagagctcttctctttctttcccctatgaaacttccactcttaacttcactctgggtgcctgcatcctagttttccatggccatgggacaatgaacctcgagtattaccccagatgaatgatgctgtttcacaatcactggttcagctcccttcttcttagggtttcacagctcggtggggagaataccacgcctcagtggtctggggagtgaggaacaaatgaagaattaatcagattttacttagaacgctatcacctgcctcaaccatcagatccatgttgggaatgtccaggcctcctctcttagatctatacccacttcactggacctgaaatcctgtgtttcccgatgtgttggtgtcactcctatgagaggataaaggagagaactttgctttctctccccactcacaccctgcacaagacagggcccaatatgagacacacactcgctcagtagttctctcatgaaggagggagggagtgacctcgagtgattctgccatctgtagtctgtgtaccctggccagtggctgtatcttcatatgcctcagtttcccctcagtaaaataggacacacaatgagaactaaaaataaaattctaattccccagtgaactgaaaggatggcctcttggccaagcggatcccagagttcctgatcatgacaggatgggaggttacacctcattacagcccctccctttggaagtttagaggtgacaactgactagcattaacgctaaaatcgagatcatgagactgacagaacagactctctgtggccataagataccaaattataaactcaacctaaggtcatgcaggcaagggctaagccacactttcctacatttaaagaataagctatgttctaacacagaattttctttctctctagcggctaaagtaacactagccttcgagataagcaatattgaaatgatcgcggctcatccaccaacactggctaactgacccctgttccaacagccacaactacacttcaattggacaggagactgatttcagtaactttctcctaataagagaccactgagcatggcctggttctgctggtatacagacacggtgcactgagtaccataatgcttgtttcatcttttgatgtataagacctaatttaatacatttaaatctgaattctccaccccaaagtgaacatggggtgcatgtagcatgcatgtttgttgatcacgcatgtgcgtgtacttcctttgtgagtatccatagctccacctataacctgttgaatatgtatacctggccaactcattcagcataaatctatcttccacattcccctcccttgaagtgcctgctattggtctctgctggaggctgcatcttctaccctggggaatggccagcctgcaggctgtaaccctgtgtaagaaataacctggttgggtgcagtggctcacacctgtaatcccagtggtttgggaggttgaagtggtagaatagtttgagctcaggagccagagactagcctgggcagcatagcaagatcctgtctcttaaaaaaattttagggaggagagtgaggatcagaaaaaatacctattggctattatgcttagtacttggatcatgaaataatctgtataccaaacccctgattacatatataacaaacctgcatgcgtatctttgaacctaagataaaagtttgttttaaaaactatctgggtgcagtggtgcatgcctatagttccagctactcgagactgaggtgtgaggagtgcttgagctcgggggattgaggctgcagtgaattatggtcccacctgtgagtagccacttcactcaaacctgggagacagagcaagaaccggtctctaaaaaaaaataaaaatagaaaaataaaatgaaaaatatatgaaataaagtctcctttccaaacgtacagatctccgatttttctgccaacaatgataaatggtcagtggcttgccatgttgtctgtgaattacttttaaaatattcacgatcacctgacctaaaggttggtaccaaggaaccgcctgaatacaccgtctctgattatttgcctccaacagagtgttccctgggcctgatctctggtggacaatgagctgctgggaacatcctctcttctctattcctcccctggggatgctgaccttcccttggagtctcctaagttccccagggcagtcggctaatgtcctagggagcttacctgtcttctccataccaagtctcatgtgaaggacgaggctttgcccttgcccagatgaggctctgggggctgagccctggctggctaccagctgcaagagccatggcccttggacagctggtaaatccttgttcccagtcagccctgcccaagatgcctcaacccagccccggcacaggcttcccagggtcacatggagtcaggatcctgggacaggggactggacaggggtttccagggctgagtttctgaacaggggcttcccaggggtcccctcactccaggatctgacatggtcctacaaggaacgtccatggggaggggacccaggagggggaactgacactgacctccccttactgagcctccccccaaccccatcagactgtccttcctctgtagcaagtgcctgcagggtctggatgcaggaaagaaattctgatctgtggaagtttgtctcccctgtgtgtgtcttgcactaaatgtccaaacccccaaatgggatgtaatgtagagggggacacaggcacagcccaggcctgaaaatcctgtgtgtgtgaagcagaactgacccccaacacccagagctcatgagacatcactgtgtacgtgaaactggccagttacttcttcattcacaagatctgtttttatgacttgtagggtgtaggatcctgtgtcattgttggtgacattctgtatcagcagacatgtattggggtatattgtctctcagcctctgtggcaggtcctggggtaattacttgagttcctagtacatatcctgtaattcccctttgtaccagttgtagccaagcctaaggcagattgtgggtgagtggaagaatctccttgccttctgcagcttcaacagtgacttgggcagtggtaggcaagttccagaaagttaaaagtgaggctaggagtggggagagagcatcagttaatactgggccctatgcattgaggtggaaagatggggccctaggtcctggacaggtctcttcatccctcagccttggagtgtgtgtgtgtgtgtgtgtgtgtgtgtgtgtgtgtgtgtgcgcgcgcgcgcgtgcgtgcgtgtcctactgggccaaggtcagcagcatgacctcccttccttcagtgcctctgaccttggcatttccctgtttggagtccttttccccaggggtctgcctggctccctccctactgccttcaggtcctgctcacattagggcatccttgggagaccccttccctgacacctctagagaccctgggtcttccctttctgacctttcgctgctgtgttccctccagggctcttgtcaatacttgacctcacattctagatacccttgcatgtctgtcttcctccctatgagagcatgagctctgtgagaacagggacttgtgtgatcttggttgcaccccagtgcctgggacaggctgcggactcctgtggatgagctcatgagtgttcccagggcccttcacaacgtgggatttattttccaatggctgaggttgttggctaagagctctgttggagttcaatcaggctggtgggaaaaatattagagatagttatagagatagacacaaatcttcttggaagaccaaaaagtttgcataactttggtaatagatctgactgaaggtggtccctttacctttagttaaacaaattaaagtagtaacaaaggaaggcagagtagtttgtctagccagcttgtttactcatgtgatcttaagactaaccattgatgtgccacaggtgcttaattgctttctacttgggaagtccacaatgtcaattaccctctaacggtgttgactcaagcctttgttaattaatcttactgaataaatatgagtctcactagctgatcaaggccatggtcacaactgtttataggactcagcagggagtctgtaagcggccctgacagactcagctggactggcaaagcaaaatatgtgtgtgtcagtgtacactattcacccgtcccccacagctggtgcccctatatgaggagtgctgccacagagctctgtttagtgtcccttgttttttttcttgagtattaccccaacttaaattgtgattattgtcatctgttttcaacattaactgctcagtgatgattcacttggaaaacattaacaatcgagattgtttcttcactaacaacctcagattatttagattttcctgttgtaatcccttcttcctgtttagtgtccaacagaagccctctgtccctctcaggtccccgttctctccaagaaaccccagccagtctctgtgctccctcctcccatccactcccagggagccctcccctcacctgtgagcagaagcgcctgccagggatgtgcactctgtgaggaggggctgagggaggccccatgggctctgctgtctgctttgtcctcctctgtggagaggagcttgggcttcagaaaataaggaggccagaaagtaaggaacaggctgagaaataatggggatgtgtcgaaaggtcacagatgccaacatctttgtcctatgcaatattatccataaaattacaggtttgagatatgcttaaattttcttctaacatgcattaaaataaacatataacttttaatagttatattaaattgtatttaatataaattaaatgctcttgtcagagctactgtgactgtcagctctgctgtccttcctctctctgtgctaagcctcctcccagggcagaagcacttcccagggccaggggtgggggcggggaaaggtaagtggcaatgaggatctgcacaggtagcctttccgcctcctcccctctcagtcctgcctccttgtcttcttttcctctttttctccaatctacatttcagttccttagaccacgctgtgagaagcaaggcttattgggacccccatcccttaacaggatgacctgtgctccccataagtgacctctgctgtgtctagggattggctctgtcagcacctcacagagagtccctggggcccccaaactcagtgttattttctctatgacacagaaacccctctgggtatgcaaggttttcctcatgttttctaatgtctgggaaggttggatttactcccagcagggaggtcacagagatgtccagggagtggggtcctagaaatggacaaatctagagctaaagcccaggtctacgattttcagttgtttttttctgcagtgctatgtgaccctaatttcctaggagtaactaaaatgcaaacctcagacatttgtagacattttatgatttttctctacagcttgtaccactgttattattatttgctttatgctttttcctaaataaatttactttacaaaacatccttgtcctagtagggtgcaggggctcacgtctgtgatctcagctgcttgagaggttgaggtgggtggattgcttgaggacgggaatttgagacaaaacatctttgtcctatgcaatattatccataaaattacaggtttgagatatgcttaaattttcttctaacatgtattaaaataaacatataacttttaatcatcatattaaattgtatttaatataaatttatatacaatacatttttatataataaattatatatataaatgtatatataatagtttttcttttttgagatggagtctggctctgtctcccaggctggagtgcagtggcacgatctcagctcactgcagcctccgccttctgggttcaaacgattctcctacctcagcctcccgagtagctgggattacaggcgcctgccgccacgcccagctaatttttgtacttttttagtagagatggggtttcgccatgttggccaggctggtctcaaacacctgacttcaggtgatatgccgcctcggcctcccaaagtgctgggattacaggcatgagccaccatgcctggcctatatattttatataattatataaagttttctataataaattttatataataatatataaaatggatatttatttaagataaagttattagttttatatatttacatatatttaggaataaatgtgttactgtgggagcccagtgcccaggcaggtagtcagtacatgatggttgtcattagggttaatactttggaattctggattttttcccaagagagtgtctacgctggaatattgggcttgtggctttctgctgatgtgcatgtgtgaagaagctacttccacttattaggacttgtgtatctgtctcgcagtttcactacctattttctcgtgatgttggtcaagtcgcctaacttttctgtgcctcatttacctaatttgtagaatatgggtaacagtacacaagtgtgagtgtgtatttcccaggactgaccactagagggcgtgaaggcaccggcacttactattacagcaatgggtgtagtagtgctcatggtcgtaaacatcattctcccatgaaaggaaccagggcttcctgggagaaataactgattccagggctggggccggaaagcacaagcggagcctggagcatctcgtgaggccagaaagtaaggagccggctgaaaaataatggagatctgtcgaaaggtcacagatgccaaccagaaggagctttgaatgaccaattttgagacaaaatgagcactataagaaataatgatagtaataaattccaacccataaatacccatgagttcctactaatataaataaataattgaatacataaatatataaggatgaagaaacagctttttcttacagcagaattccaattaatgaatgtagaaggaatgatcaaatagaaaatcactatttggctaacagcacagtcaattgtttgtaggcaagaattatcaatggactttaaatatgaatgggtaaaagtatgatgatgctacaactagtgagtaccaagggggaaaaaaaagtacgttgagaagaaacaggctacttccatattcccaaagtatcacttcaggagctacttattgattataatgggacaaatagtaacttacagtagagaaacctggcaacagagtctctccgaggtacaaaggctctcttcaggaaggaggtaaggggaaggaagaagaaaacactgtcctgcctcaattatttgctttccccattctcaagtgtacttcatagacattcaaagatatgtgttgatagtgtccacgatccacatggctctattatagtcatttattcacacatacattcagtgaggctttgagtgcctaatgtgtgcctgatatttgctagatggtggatgctgagaagatcaggtgtgctgctgtctctagggtgactgaatccacctgccccactttacagatgtggaaattaaagtgaaaaggatttataggattagttcactgtcacaaggtcactagccttaaagttacaggagtaaagcaagtttcctgacttgctagattttctgctgcaggtgctgacaatggtgagctccaataggagagaggacactcagagtgaagtgggagccctgaacaccctggattagccaagaggacatgccgggtccagctgtgaccgcacaaaggaccattggggatatttgtattctctttttcacttagagcttgaaatgaggaaaactaagtgcagaaaaccaagagtggaagatttttcacaaagcactggtaacatgcatcagaaaaccctgtgctgatgtctgtcacggtgtttctcactgaacggtaatagtctggctttgagtgtgttccctctacagcctggagttctgcgaggcagggaccaggtgtgattcatctttgtctctccagtgacagtacacagcaggctctgataaatatttcttacaaaataaaatggaataaaaagtagacatctgcacaggtgtgggatgactgagcagcagcagaagcaggaaaagtcagcgtccccagatcagctgatgtggtgttcggattctagataggggtgaggtgccaggatggggatgggggtcctgtggctctgctgccctgggggacacccctaggtttcacagtgcctgctgtggttgctgcactttgcttccccatgggaaagtgatcagagggtgtggggcttcaggtgaccccatgtgggaaatggccaagggaaggtggggtgggcggcacatggttttttttaaccaatatttgaaggtaggttgtatgaaaaggtgttaggcttatttcagcttatggggagtaggacagggattggtgagtgtgtatcaggtatattttggctcaggatggaaaagaactgtcacagtaacataaggtcttttgggaaattacatgtttactggcagagttcaggccagggctgggtgtctgaaaatacctgtcagggtcacttttatggttacaagggcagagcttggcttggaaccaggtttcttactaataccacatattaagtattataaaaactgtcctttgcaataggacattgctctatgatgcaggttgaggtccctctgtttaagtaattgtgggtggctgtgattctctcatctagtctgcgacttggacttcacctccatctgcagtccctctcctttgctgttgacactggtcagagttaagcgcatttactgacgatggtcacagggtggcagcactgcctctctggtattttctaaaacctcttcctggaactgagccagtctaagaggatgtcatgactaagaaaagggcactaatgaggtgaacagataattttttttttcttgtttctcctgtgaagtaacagagtggaggtgagcatggaataattgccttttagaaatggaagacaatggagagaagtgtttcgcaaaccttaatgtgttcacagatcccacacagatctttttattcaatacagattctgatttttctggtgaggcctgagattgtgcatgtctaaggagcttttggatgatgccattgctgctggttggcggaccacactttgagtagcaaggctcgaagatcatttagaggttaattctcactgcatctaatttatggatgaaaacaaaccaaggtccagagagagcatatacagcttgcctaacaaagccattccctaagtgcctgacttcttgcatttaaacccagggcttcagcctttgtccagttctcactccacacatcacacggtttgttcactgttgtgaacgacagttgtggcagcatctctttagtttaggaatccagagccccaatttcactaccctctttggtcttggctcatgctgtgacttcgaatagttttgcccttacttaaaatcttcagtggctcttttgtaatcacaagatcaagttcgaatatctctgtctagtgttcatggctttataacatatggtatctctttagtaaccttacctaacttccctgttttaaaattgtctcttgctgccatagccctccttgctccttcctgctccctaacaaactgtgttcacttctctctcagtggtagtgatgatggcatggcctctgatgttagactcatgtaacttctaatcccagatccaccaccaacattggcaagttgattcatctttctgaggataagcatcctcctctgaaataaacttagatggcggttgagaggggtaaataaaataacacacaaacccactctcatccctgagaccctcttcaaaactagcatataaaaatagctatttgaagaggttcagtgaaattcaaggtaacacagagaaggaattcagaatcctatcagataaatttaatagactgaaataatttttaaaaatcaggcagaaattctgtagctgaaaaattcaattgacaaaccgaagaatgcactaaatctttcaacagcagaattgatcaagcagaagaaagaatttgtgagcttgaagagataatatatgaaaactcagagtcagagagacaaaagaaaaaagaattaaaagaataatgcatgcctacaaggtttgattattaagctactcaaagagatacaagagaagggtgaaaaccaacataaagaaatgtaaaaaacaatcagaatataaatgaaaaattttctaaaatgctagctagtttttttttgagacaggctcttactctcatcacccatgctggagtgaagtggcacagtcatggctcactgcaggctcaacttcctgggctcagatgattctcccacattagccttccaagtagctaggactaaaggcgtgtgccaccaggccaggctaattttttgtatttttagtagagatggggttttgccatcttacccagggctggtcttgaactcctgggctcaagtgatccaggagattcactgccaaaaaggatataaccaagtcatatagtcataggttatctaaagtcaatgtgaaggcaagaattctaagagcagtgagacaaaagcatcaattaacttataaaggaaaacctatcagtctaacaccagatttctcatcagaaaccttacaaaccagaaggtattggggtcctaatcttttggcttcttaaacagaatagctctcagccaagaatcttgtgtagagtgaaattatatttcaaaatgaaagagagaaatacagtctttttcaggcaagcaaatgcttcaggatttgtcacggctagaccatcctacatggaatgttaaagggacttctaaatcacaaaacaaaagatttaaatagaacagaatagaacctcttgaaaccaaaaaattcaaatggcctataaaacaataacacaataagaaaacaaagtagataacgatcaacatgatgactggaacaaatattaacattgaatgtaaatgacctaacactccacttaaaagacacagattggcaagataaataaaaaatcacaaaccaaatatcagctgtcttcaagagactcacttaacatgtaaggattcttatagactcaaggtaaagagatgataaaagatattccatgcaaatggaaaccataagtgagaaggaatagctatccttatatcatataaaacagactttaagcaacaacagtaagaaaaagacaaataaggcaactatataatgataaaaggatcaatcaaacaagaagatattacaatcctaaatatatatgcacctaactttggagctcccacattcataaaacggttatgatgagacctaagaaaaaagatcaacacaaaacagtgagggtgtcctgggttttctttttattggacagcagtgtactagcctatcactttcccagtcaggggatttttggtctccccattcccctaccatgggttcatgccaaagtccatattttttattagtgtttggaattggattttttttttttgaggtggagtctcgctctgttgcctaggctggagtgtagtggcacgatctcggctcactaacctctgcctcctgggttcaagcaattcttctgcctcagcctcctgagtacctgggactacaggtgcatgccaccacacccagctaatttttgtatttttagtagaaacgagatttcaccatattgtccaggcttgtatagaactcctgacctcatgtgacagggaaacaggcactcagtgaacttcatgcgattgaggagttaatgataatgagagaagggctgtgaggggacagcactggggacaccagagcctgtgacgggctgagttgctgtgccttgggagatgcccttttgactgagccctgggaaggagggggtgtgggggcaggagctgcctgcagagggagtggcctcaggtgggcggccacctggctgcagggaagaggtgacagagttcgtgtgcagagcttggagggtgaggaggaggtgggttgaggtgaccttggtgagggtgaaccatggggggctgtgggccctgctgagggaggccagccagccctggacctacagggtggtttggtcttttttgtcccattcccagcatccactgagtggtgaaactctgcaggccagggaccatcccactggccagaaggagcgcacagtaggtgcccactcagtgcatgttgggctggacagaacctcactctgccccctgcccccagctttgggagctgcagcaaggtccctccccctagggatctccatgcctctgtctctgaggggtgagatggggagacttcaaagggccatctcagagtgtgggggatagagacgcagaagtgtgggggatagagggaggcctgggctctagacccaaaggaccttacacacctcctgagtcttttcaaatggtttcttctgttactttaaaaatgatgtaagtcatcatatttattgtaaatcccaggaatctaatcatgcgtaaaataaggtgtcttatccttgaccccaccccttccccaattaaatttccaggatgttaccactgtttgcagttggtgtgaatctctctttaataatactctgtttatctcacttgtcgttttacgccaaaatacccattgaattatattattgctgaagaccattcttttttttttttttttttttgagatggattcttgctctgttgcccaggctggagtgcaatggtgtgatctcggctcactgcaacctctgcctcctgggttcaagtgattctcctgcctcagcctcctgagtttctgggattacaggtgcacaccaccacacctggctaatttttgtatttttagtaaagacagggtttcaccatgttggtcaggctggtctcgaactcctgacctcatgatccaccctccttggcctcccaaaatgctgggattacaggcatgagccaccacacctgcccagaccattctgttctactgaatcatgtgtggtgggcacctcttatatcaatacatatggattttatcttgtgtttgttattggctcccctttttctcattgcatggctacactcaatgctttgtccacacccctgttcctgggttggaatcttgtgacagaaaatgaagtaacaaaggctaaagctttctaaagtggagtcaggagattgcaagacaattgcactttcaccagcaagagctcaaaccacagaatgttccaatagatttggataaacagctgaagtcagtattcaccagccttcaacatctcaactaggagaaccctaaaattaactaagcacatagaatggaatggacttgtgatttaggattccttctcagccaatgagctgcttctgaaaacaactttttgtggaaattacctgtaaagaaaaccctctcctgtgcttgtcttacagaacactagtcagggctgccctgattcagtggacccgaattgctattatttgtttcctaaacatatggtattttctgtgaccttcatctcaatcttttttttaagttactgggctgtttcccagttttcataatgacgagacattctgcagtgtttcatacacatgtcttttccccatgtggagtattgatccaggagctcattcagtcaacgcatgtttatgaagcatcctgtgccaggctgtgggctggtcactgtcttcagcagagagaggacaggcacagtcttgccttcacagagctcacagctcagggaggctcttagaagtgggatactggtcggagcatgtgcacattaaacatgatgaggtcaaggttgctatagggactaaaccacagtcccaccaagatcgcattgagttcctgtggtagaccagaggtcagggcccctaagatgtcctgagcagctccctctgctcagaagttttggttccacaggtgacacacctgagcacaggtgacccctgcagaacctgtgattaccacccaaagccaagagtgagtggtgggtgttctaggaggaaccgtcacctccatgggcagggttggggaagactgaggggagcaggtggctgatgactttggccagaaggtagggggatgggcaggtgtgcgctcatagggaagggaagagaagggagggcattgcaggcaacaacacaaaggttggaacctgccttcatggactgagaaaagcagggagtccacccaggctgcagctggggagggaagacatggggagcagtgggtctaggggagaagcagactgcgattgaccttggggactgggcagtgagcagaggtgtgttatgtgtgtctgtccccatcatagatatgaggaggggtgaggccgcgggtggcacctgggtcggtgggatttcatagtgcctgctgttccctagagcctctctgtatagagggtcagaatagatctgaggctgtggtctgggggaaggggctggtggtgcttaccatctctaggggtgggaggagagggatgaggatgcccctgagcagtgaagcctcaaggtgtgtggagccacagttgtctctcattagacatgtgttttgcgtgaggatgccagggcctggtggttattactgttgtcaagtttgcatgacaaggacccaggtatccagggatccagagcacagggcccctggtgaggggatgaggctcagatggggctgaccaggttcatgtggtcagagtgggagggactgatggagagacagagcctcaacccctcctgtcaggagctgtggctatgtccaggagagatgacaaggatgacccaggacattgagtgagtcattgagacattgaaggtgaggacagggcagagaggaccctggtgactgctgaaatgtaggatgtgaggagggctctgacccatgcaagttacaggacctccccacccccgagcccacagatgacccttaaattgggcatcctgagtgctgtgtgtgcccagcagggacactggataggctggacctgagtctctgtaagggcagcgctggtctgtaggaccagagtcttctctgtgggtgtgacgtgggcaggaattagcaagatgggggtgacaaggcttggcttggaggatctggtacagaagcccatgggcttggtcagctcagcttctcaggggctcagctggggctggaggagcaggatgctgtgctcagggcatgctccaggcagcgtgatgtgtgtggttccagggtcaggcacgggggtcaaaaattaaccatgaaaagttcccaccttctgtaggcagagaaaatggcctgattgtcagggtcagggagacttaccatgtggccaaagcaggctctcagcctcccagagaccacaccctgggtgcagcactcagctctgcagggtatggcaatagatgtgccaagaaccccaacatccagatgcatgcaaaaattttgcgatatataaaatagagcagatcaagtttccctgcaataacgttgttcctggttgtgtctttttcttgtaaactagacatggacatctttccagcagtctgttctcatctgccaccttcctgctgcagcacctcagaatgaacattcctgagacactgtccgtggtgctgacgaccaagagctatggaacagagtgtgatgtagaatcttctagttacctctgctctcctttcacttttaacaacagagcatcattaacaatgagaaggtggagaggtgttcaggatcttgaagtgacttctgtcttgctctcccataaccctgaagctgctgtagacattattgcagaaactgacaccacagtcaggatggccttgtccaggagcccatgtgcagtttgtagtgagcaaggatgagaaaatggtcttgaaaggggtgatggacagaacaggggcttttcaaaaatgtcacatcatcacccccagcatccgtgaatctgtcacatggtaagagaccttacagattaaatgaaggattatgagtttggaagattattgtagtttatccagatgggtccaacataatcacagaatcccttccttacaaatgagagagggaggtgggagagtcagagaaggaggaggagatgtggggatagatgcagaagacagagcggtgtcaagatgctgcactgctggctttgaagatggagaaagaggacacagccaaggatgcaggaggcctctaggaggtggaaaaggagaggaaacgcactctgccctggagcctccagaaagaacgcagccatgtgggcaccttggttcaagtttctgtgtcacttagcttgtgggaatttgtcacagcctcaacaggaacctacagaggagtcaccttgtgtgcaggtgggatccagggtcatttacagctaaatcctgatgtaaatattgcaggttgcttttcctacttcctatctcatggccaacaaccctggacaatggcagaacacccttggaaaccacggctctgtgctttagtggagggaccagcttgtttgtgggaaggtagcacctggtccaagtgaacctacatgagatcgttactctccccagggccctcagggaagggctgagaacagctggcccaggtgtgtggaggagctgcaggtgaggcagggctggaggggcctgtgggtccaggtagaggggcagacaggttgtcccatcgccatgggagcctgcacgagctttaggttggggaaccctgctcctctgacctggacgctcctgtgtggagaggaggcttgctcagtgagatccacgccagggggtaaattgggaactgatgggaaatgaggggctagagtcctgggtagtgcctgggaggaccttgctcaaggactgaattcttggtctgttcccaccttggttactctgacaacccctctctgtgtcccacggggataaagatctcctgagcagtggccattgggacagaggagaacctggtggccagagctaagcatccaggatcctggatttggggacaggcaagctcattgctgggggacagtgatagatacggcctccagggcctgggtgaagagagcaggagggctcaggacactggaggctgtgtggaggtcacacccacgatctgtaccacccatggatgctcctgcattgctcacctttgtgtggacatcagatggccccaacttttgcactcctgagacatctcatgcattcacagagggacccaggctggggctgtgcatggccttggtctctagggtagtgtgaggacagctgagcactcagctggctgggcaggactcctgcgaatcctgccctttcctgtgtagggtccaccccagcctgactcctaaccccctactcctgtctttccagggaagagagactggggttgagataaggtggagatatttttcctgtgtgacccaggagagaatggacatggagtttcaggtgagtttctgctaagttcccatgagcagaaaaagagccaatgagaggaagtttcccctttattcagatcctttccaggtgaccccgggtgggccataggcccattcactttccctgcaagcccccgcttcctgtggtgatgggaagccttcgccttggcccacccagagcccggggcagtctgttgaggtctctatatattcagcagggacccccatcccttcctgtccccaggcctgtgtctcctcaggactcagagctggttctctggctcaggctccatgtccttccccatccccagggctgggggcttcagggacgctccatcaacccacaggagcagctcccagaggaacctaagaagccacatctgctttgtggtcgatccagcagtaaatgtttgtgtcagagtgtagcaattccagtaaaaacagagaagaggtcttgacccctgaggccttctcagaacagggtctggcatctctctctgggcccacccagggctactctgggactgaacctggctgtgctcagggggttcctgctcccaggcccctccctcctctgctcaccacctcctgttattttcactgcagtttcctgaacttcagctcagccagatgccagtggggacagatcctgggtctccctggggcccaagggaccagaatatctgtggcccccactcacctcatagatgagagcagctgccctggtgctgggtaggggaatctgggcaggggagagaggggtgtcaggggacagggaaggattcctgctgtgtaggaattccagggctctcctcaggtgatggagggtcccagggtggggttagcacagggagtggatgatcctggccctgaacagaggcccagctcatggccagggcaggtctaaccttatccaagtcattctgggtagggtgggtttgtgctggggattgacagtccccctgccctgagcctgcacagctggggccccagtggaaatgggattgggaacggacagtcttacctaggagatggagctgtcagagggtccatggcctggggacagagacaaaagtgagcacgagagtgttaggatagctgggcccctcctgcaagagtgtgtgggggtcctcagttcttagagaattggggagagggagcctttctcaggttattttaggggtcaagtaagcaagtgaggttgaggaagtgacccatgacccagagcccggaggttagggctgacccggccagttggggtttcctgtgtgatgttttatgggatcctctttgcagccccagggatagggtcagaggcccctgggtgtaactggcaggagtggacaacttggggctggcttagtagttcccagccacacccagactgaagggacactcaccgggggtggaggctgggggctgctgctccctgaagtcactctgatcgctggccctaggaaaggtcagggttatttgtgaaggtgcaaggttaaaagtcacaaattggagttaaaataggggaccaggaaaggagcctatttccaagaggggtatggagacctcctttctttatggagttctgtggtaggaggggcccaggtgaggggagttgaggaaaggccttacaaagccacatctgtcctggccagaggggaaggactctcaggcagatgctgggccaggagaacattgatccagtgacacaggaaagggactgaggacccagggaaggaatcagaccaccaggggttgcctgagaggaagggtcaaggcaccagggggaaagcagggccaggcacatgtgcaggacactgaggggactgcatgcatcttggattctcctggaactcagtgtccctgctgtgaccagacactccactcagggctggagatgctgaaatgggacaatgatcttgtcttctgtctctgccctttggcaagagacataaacgacattccaggatatgccatattggggccccggttctcccttctcacagctcagtgtctgcagttaccatgtcagtcaaaggggtgctgaccccacccagcccgtccaggctgttccagtctccactatgtgataatgcccaggatcccccctcagatgccctctcactgggtggatggattcagtgaacagggggaggtaccaggtattgagcaccgctcccccctgctccaggcagctgtggctttgctgtgctaggaaactaggaccatgctcaggggcatggccttaattggactgaattcactgaggacaaagctgttgaggaagcagcccagggtcagcagctggtgaggaaggtgccatggaatgagagggaaggatccctggggagtcgggaggctggggagagcctggcactgaatacaagacagggtctccttccttctcgcctggggtcagcgtgaaggatgggagcagaatggggaaaagctgtggtacctgccagtttttcggaggagcaggaaacacacaagtgcagccaccagaagactcccaaccaggaccccgatcaggatgcctagagtgttgtcatctgctgaaagaagaaggcaaaggggatgaggtccaaatctgttccagggggaaccatgaggggccttgcagggcaggggcatggtcagggaggaaggaaatgccatggagcctgagtgtggtctgttgtgctgtcctcatagctggctcccttgctctccgtggttgcaccattttctgtgtcttaggcttgaattactgggatgcatcaactcctacattctcccacaggaagcctgcacctcatcctgctcctgtgttttttagtccctccttcctctcacatcactcctcttccccctgtttctttttttccatcccatggcagtcgtaaagggcaggcccttgctgccaactcaatgctgatgagcagggatgatgttcattgactgttttcaggggccttccacatggaaggcacagtgggaatcaatctacctgcagcttttctcaccctcccattgccttgagggagaagggtatgtgatattgtgaaatacgtatttggtgttcatcaccattgatatggttaggctctgtatccccacccaaatctcaccttgaattgtaataatccccatgtgttatgggagggaccttgtgggaggtaattgaatcatgagggtgggttttttccatcctgttcttgtgatagtgaataagtctcaggagatcagatggtttcataaagggaagcttccctacacatgtcctcttgcctgctgccatgtaagacatgcctttcaccttccatcatgattgtgagacctctccagccatgtggaattgtgaatcaattaaacctctttcttcatacattaccaagtctcaggtatgtcttcattagcagtgtgagaatggactaatacagtaaattggtaccagctagtggagtgctgctataaagatacctgaaaatgtggaagtgactttggaactgggtaacaggcagaggttggaacagtttggagggctcagaagaagacacaggaaaaaagtttgaaacttcctagagacttgttgaatggttttgattaaaacgctgatagtgatatggacaataaagtccaagctgaggtggtctcagacagagatgaggaacttcttgggaactggaacaaaggtgactcttgttatactctagaaaagagattggtggtattttgcccctgccctagagatctgcagaactttgaacttgagggaaatgatttagggcaactggtggaaaaaaaattctaagcagcaaagtgttcaagatgtgacttgggtactgttaaaaacactcagttttatgtatttacaaaggtatggtttggaattggaacttatgtttaaaagggaagcagagcataaaagtttggaaaatttgcagcctgatgatgcaatagaaaagaaaaatccattttctgaggagaaattcaagccagctgcagaaatgtgcataaacaatgaagagcaaaatgttaatccccaagacaatggcaaaaatgtctccagggcatgtcagagaccttcctggaagccccttccatcacaggactggaggcctaggaggaaaaaatgtttcctgggccaggcccagggctcccctgctgtgtgcggcctagagacttggtgccctgcatcccagccactccagccatggctaaagagggccaaggtacagctggggccatggcttcagagggtgcaagccccaaaccttggcagcttccatgtggtgttgagcctgcaggtgcacagaagtcaaggattgaggtttgggaaccttcgcctagatttcagaggatgtatgaaaatgcttggatgtccaggtgaaagtttgctgcagaagcagagccctcatggagaacctctgctagggaagtgttgaagggaaatgtggggttggaaccccgacacagagtccctactggggcactgcctaatggagctgtgagaagaagaccacaatcctccagaccccagaatggtagatccactaacagcttgcaccatgcacctagaaaagctgcagacactcaacgccagcctatgaaagcagccaggagtggggctgtaccctgcaaagccacaggggtggagcccaaggctatgggagttcagctcttgcatcagtgtgacctggatgtgagacatggatacaaaggagatcatttcagagcattaagatttggctgccctgctggattttgggcttgcatggggcctgtagcccctttgttttggccagtttctcccatttggaatgggtgtatttacccagtgcctgtacacccattatatctaggaagtaactaagcttgcttttgattttacaggcttataggtggaagggacttgccttgtctcagatgaaactttggacttggacttttgggttaatgctggaatgagttaagactttggggaactgttggaaggcatgattagttttgaaatgtgaggacatgagatttgggaggggtcgggtggaatgacatggtttggctcttcttcacccaaatatcaccttgaattttaataatccccacgtgttgggggaaggacccagtgggaggtaactgaatcatgggggtggattcttcccatgctgttctcatgatagtgaataagtctcacaagatctgatggttttagaaaggggagttcctctacacatgccctcttgcctgccgccatgtaagacatgccttttgccttctgccatgatttcaaggcctccccagctatgtggaactgtaagtcaattaaacctcatttttaaaaaaattacccagtctcaggtatgtctttatcagcagccaagaccagctcggtcgcggagatcctaacccagcagtgctagaggaattaaagacacacatagaaatatagaggtgtgaagtgggaaatcagggttctcacaggcttcagagctgagagccccaaacagagatttacccacatatttaataacagcaaaccagtcattagcattgtttctatagatattaaattaactaaaagtatcccttatgggaaaccaagggatgggccgaattaaaggaataggttgggctagttaactgcaacaggaacacgcccttaagatgcagattgctcatgctattgtttgtggcttaagaacgcctttaagcggttttccaccctgggtgggacaggtattccttgccctcattcctgtaaacccataaccttccagcttgggcattagggccattatgaacatgttacagtgctgcagagattttgtttatgaccagttttggggccagtttatggccagattttggggggcttgctcccaacagactaatacacccattttctggtatgtgactctaaagtccttagaatcttcaaagtgatgtctttttcaagctaataattgactgatgactggcagcccctaggcaacttcagaatgaggctggtcactgacccaggtaggattagagggttgggactttcagcctcacccctaatccctggggagggacctggagtttgaattaatcaccaatgaccaatgaatcaattaatggccaatgattgaatcaattaatggccaatgattaaatcaatcatatctatgtcatgaaccccaaaaggactgggtttgaagagctgaacccatggaagtttctggagtgtggtgcatctggggagggcatggaagctccacaccccttcccacatgccatgctctgtgcatctcttcatctgcatcctttgtaaagtcctttattacaaaccggtaagcctaagtatgtgtttccctgagtcctgagagctgtttgagcaaactaatccaacccaaacagggagtcatggaaacctcaatgtgaagccagtcataagaagctctggaggcccagacttgtgactggtgggaaggtggtggcaattttgtgggactgagccctctgctgatatgtccaggtagatagtgtcaggatggaattggaggacacctagctgatgtacggtgcagaactgattggctgctgggtgtgtgggagaaacccccccgcatcacatttggtcacagaagtgtgtctgtgttgatgattgttattgtggagtgagagcagaggaaaaacacagtttgagtttttccaaacagggtggaatcccatctgccaatttagaatctgaaacttatagtttcagtacttcaattaagattgaagtacttcaattcagtacttcaattaagattcagtacttcaattaagattcagtacttcaattaagattacagaactggtaagtgaaagtgatacaacaaaaatgtaaccaaagtctgctcaacttaacagctaataacaacaaagttcataaaaataataccagtcgatattgatagcactgattgagccctggctctgtgcatgaccttgttaagggctttaatcgcattaatctctgaataaatatcctcacaaccaccctgagatccaggtgtttgtaacaattctacagatgaggaaactgaggcccaggaggttgagtgtcttgcccaaggtcaaatacctggtacctattgtaaccaggatgataactggatgagtctaatccctgagttcttacccacattgctccccaggctctgaaggaatctcatccttctcattccgtgtatcattttacaccccccctccctcctaggaaaatatacaaggaaaggagtgagaggggccgagggtcactcacattttacagtcagcttgagggggtcgctcctgttggagctgactgggttggagacctcacactgatactccccagcgtcctcctgcctgatggggtctatggtgagcatatggttaaaccaggacagcttcatcctcttcgtgacctgcagacgctggttgttgaaaatccactggaaagaggttccagtgttatttgtgtggcaggtcaggaccacggagcccttctctgtgactgtggtgctgctggcttggatggagggctgagccactgactctgtggatagagtgaccaacagaaagtgtcttggggccatgctgcatcctcagagatctcagagtcaaatttagaacattctcctgtgaataaaggagaaagatgaaggacagggaggagcagagagaaccagagacacccatagcagcgagcagtagggactacagtgacctcagagaccccagggaccaggaggacccagctgcctcagaccaggaccagggagccctgaaaaccctcccacagatgagcggccccagagtcacatgagatgcaatacctggggtggctttaggagcaggcagtcagagaaatggaacatgggtctcagcccctaagggacaaggaagaggtgtggccagctcctcctaggatcctacatccaggacccagtctgtaaagaggttatgattattcctttcttttttcattaattccctccctccttcatcagagaactactgagtgtgtgtctcagttgggccttgtgcaggtacagggtgtagtgggaagagaaagctgagtcctttccttcatcctcccatgggagtgacatcaacaaatcaagaaattcatgatttcacgtccagtgagggaagaaatgtggatctgatgggagaggcttggacaatcctggcattgagtctgatagttgagacaggtgatttcgttctaagtaaaaactgactaattctccatttgcccgtcattcctcagaccagaatctccctctctgagctgaggatgcccaagaagaaaggagctgaaccaacatctggtcctggggtccacagatgccccacggtggtggccacgaccagattctgggctgcagacacacggtggtgtgacgttgagcactgacagcctgtgtgatgctgatgcaatttctctttaataaaatggggtaaatgtcaatggtccctggcttgccatcctctctgtaaattaacattaaaatatttacaattacctgacctaaagcttggcacagaatagctccaaataaacatcatctattattattttactccaaaaaaaaaaaaaaaagagttctctgggcctgattcctggtggagaaggagcggtccagagtgtcttttctctgctttccctcctcctgaggacagtgcacttcccgggacatcttttaagtttcccatccagtttaatggcctgggaagtttgtttgtctgtcctctccactctgactctcaggtgaaagatgaggctctgcccttgcccagatggggctctgggggctgagccctgcctggtgaccagctctaggaaccacggccctgggacagctggtaaatcgttgctcacaatcagccctgcccaggaagccacaacccagccctggcacaggctccccagggtcatctggagtcaggatcttgggacaggggcctggggcaggggcttgaagggctgagcttctctcagaggatcctcaggccaggccctgactgagtcctataagatctttctcaggtcatgtctatgaggaggaggccaagcggggttggactgagactgattttcccccgctgcatctcccgcatcagactatccttcttgctgtagggaatttccacggagtccggataagggaaaggaattctgatctgttatagtttgtctcccctgggtgtgtcctgcactaaatgcccaaaccccaacatgggacgtaatgcagagggggatgcaggcacagcccaggcctgacaatcctgcgtatgtgaagcagaactgacccccaacacccagaggcacggaggaatcactcaccgtatacacggagatggtgagatgcctgttcaatctgagaatttctgtatgtgacttgtagggtgtagtatcccgtgtcctctagggtgacgttctggaaatgcagatctccactgggtgatattgtctctcgaccgctgtatgcaggccctggagtcctaacgtgagtgtctattacatatgctgcgattagctggttgggctccaccgttttccctttgtaccagccatagctgtaaagattctcgggcagataaaccacagagagatgaacattctccccttcagcaacttcaaagggcgctgatgcaataaagagccaggcagtggtgggtgcgttccagaaagttaaaagtgaggctaggaaagggagagaatatcagtcaatatttgacctatgcattggcatggaaagacggggtcctgggtgcaggtctcttcacccctcagccttagagggtgtgtgtgtgtgtgtgtgtcctactgggtcaaagtcagcagcatgaccctcattccttcagtacctctgaccttggcatttccttgtgtgaaccctctttcccaggggtctgcatggttccctccccactgccttcagttcctactcacacaagggaatccctgggagacttctttcgtgaagcctcctctagagaccctgggtcttccctttctgacctttcccagctctgttccctccagggctcttgtcagcacctgacctcacattctagatctctttgggtgtctgtcttcccccccatgagattgtgagctctgtgagggcatggacttgagtgatgttagttgcaccccagtgcctgggacaggctgcagactcctgtggatgagttcatgagcgttcccagggccttccatatcctggggtttatttgctaatgtctgaggttggcagatgaagacagagtttcatgccctggtggtgtttttatttaaattgtcactgtgatatagttttactatcattttcaaaatgtagtggccactgacaatgaacttgaaaacatggaccaactgagattgttttgccccttggcaattccagttcacttagattttttggttctccttagacgctctctcccctgagtctctaacaaaagccctctgtctcctctcagagccccatcctccccaggagaccccagccagtctctgtgctccctcctcccacccactcccagggagtcctcccctcacctgtgagcaagagcccctgccaggggatgcattctctgtggggacaagctgaggggggccccatggtctctgctgcctgctctgtcctcctctgtggagaggagcttgggctccaggaacgctctagacagggttactgtgactgttgtctctgctgtccttccttcctctatgctgagcttcctctcaggcaggagcacttcccgtttatgggcaagggcggggctctgcctacaatgtctctctgtcccctcccctctcagtcctgcctcccttgtccctcctttctccttcctttttgcctatatttggttccctaggcaaaactttgagaagcaacgctgatggggtcctcataacaggacgacccactctccccagtactgacctctgctgtgttctggccttggttctgtcacagccggtagattatttccctttgtgacacacaaaaccagctgggccctgggtctcctcatgctctccagtgctccaggaaggcagaatgatgcccagcaggaaagtgacagaggtggctctgggggctagaaaggggctcactgggtgatggctgggaaggacccacccgctatcttcagtgtcaccagcctggcctctgacccagggacagagacccaggcctggaggtctcgggaggatccccagctcctaggtgtggagggaggtgtcctgtgtgtcctgggaagagaggactttgatggaaggaggtgggaggctctgggttctgctgtccttggtgaaggtttcagggggaccctctccatgtctggggtctgtgcccccagcttaactctcattctctttgcaaatacatatattttgtggatctgcagttgcctgaactgtctcatgtccctaaatctttgtatccctttttacagaaggtcaggaagggtgtgtacatgagtatgaggactatctgatcagggcgagtgtttgtttcccaaagatctctttagatatggtataatacataagataaatgtactgaattagcaattttaagtgtagaattaaatgatactaattctattcacaatgttgtacaaccatcaccataattttttaccagaaaatcttcattataccaaatggaaacttcatacttttaatcaataactccccacttccccctgccccacccactggtagcctctgatactatcaatctctgtgaatttgcctagtttacatgtctcatataataaggaattatatacgtgtattatttttttctggattatttctcttagggtaacacttttaagattcatccacgtcgtagcatatattacagcttctttcctatttatggctgagtaatatcccaatatatgtttatacctcaattttaattcattcatctcttaatggacatgtgggtggtttccacatttttgctattgtgaaaaccgctgcaatgaacttacacttggaagtatctgtttgggtttctgtgttcatttctttgggggtacatataggagtataaatatggggtcatgtggtagttctatgtttaagtttttgagaaacagccaaactgttttccagtttgctgtgctattttatattcccatcagcaatatacgagggttccattttctctacattcttgtaaacacttactatttaatattttttaaaacttatagccattctagtaggtgtgaagtgatagctcattgcagttttgattttcatttccctggtggctgatgaagttgagcattttttcatgtatttactgacaattttaatattttttagagaactatttattcaaatcatttgctgtttaaaaaaaatgggttatctttttattattcagttgtaatagttctttatatattttagatacaagtcccttatggggtacatgatttgcaaaatttttctcatattctgtgtcttctcactttcttcatggtgttctttgaagcacaaacatttttaactttgatgaagttcacttatctatttttaattttgttacttatgctcttgatgtcatattgaagaaaccattgcccaatccaagatcattaagttttactcctatatgttcttctaatggtttgataagttttgctattccatttaggtttttgaaacattttgagttaacttttgtatgggctgtgaggtaggggtctaactacactatctcgcatgtggttatccagttgttccagcacaatatgaagaggctaccattctttccccattgaggaatcttggcacccatgtcaaaaaccaatgggctgtaatggtgagggtttatttctggactcttgattctattccattgatctctatgtgcattcttgtgccagaagcacactgttttaatgattgtagtgttttagtaagttttcaaattaggaagtgagtcctccaatttttttttccagattgttttggccattctggggtgacttttaaaaaagatgtagttcaatggttctcaaagcaggagtggttcagctctccttttttggcagtctggagacctttttaggaccttaatctaagtagataaattattcccactttcttttctgagttgctatgttacagtgtatattgacacccatgaaataattgagagaccctggaagtgcttgcctacatagtgagggacaattagttccatgatcatgggcacagaagattttgttttgggaaacaattttgttggtggagttatattcatgcttactcttttatttgtcttcatagcctgcatctccttcagacttcatatctgtttattttcttgtttgtcctctggggtttgggtgttgggtgaccagtcagctggagctggaggaggtgcttagcaaggcagtgaccctggttgggaggagcagggctcagcagggtgaaagtagctgggccttgagtcaggagtggcatctggaaggcctgactgtaagggtcagaagggccagcaggtgggtgtcctaggcacaaacggtggctgctgctgtggactggaggaaggtaagaggccccgagtattccatgttcttactggctccccaactgaggattcctctcctgggctggtgctgtcctgcagcagggaggggttagacagggacggctgcacatcaggccggagtccatgtcatcctcttaggcactgtcactacagattgaggattctgttcataagccaagcctttgcacaaggaagggacccgggctctcaaggaagagcagctcctggtcagacctccatctccttctctctcattgcctgaggcctcaagcttggtctacctggcacaggggtctggatcctcctcccagggttggggtcttactgagctgggcacctgcaggtgggagaagatctggaggggccccatctgccttcaccagattgatgttgagggtccctgagtcctgcaccactatcaggtgctgagcaacttccagtgtcagtgacaaccaccccatggtggaagcagaaccacctcgtgagaaagcacctccaagcctcagtgcttgccatgtgtgggaatttgctggtttcagttgggggcatgttggtgggtggtcatgaattcagggccggattctatgctcacagtgcacatgctggatgtggtacagaccccaggcagggctcagtggggtggttttgggtgtgcacaggtatcttttctggaggagctggtggtgatttggctcccagaagttcctgagctctgcagactcaccaagcactcaatatttgagtgaacattgggcgagagagcagaaggtaagtgtcagggcatcggggttggtgcctctgggaagaggaggaacattctgggaacaaagctctcccccggcttacagggagcttcccatcgctcctgccttgaggatcagggaaactagggcctctgctcttccaggggctgcttgcaggcagtttgctctgggagggggtgacccaggagttgcctctcattttgcatttgagatttaaaaggagaagggacagtatatcttgccaggtcacaaaaattacaggcatcatattgactgaagggcactcctgtcatcactgcaatataccagaatggtcttttaaaaaaataagtgatttaggtttaccagcaactgtaatgcttgttttattcttctagttcaccgttaatgtcacttttgtagttttagcactggcaatgttgattttatgttgactctgatgattttaagctttcatttgttcacatagagatcatcttctttctgaatattaatgcattttttctctatttctactggttattcctgtacatagagtagagaatcacttttcccaaggaggtggaaagcttctgactaccaaaaaaaaaaaaaagtgtcaaaatgctttaaagtcagtaacttaaagatcaaatccaagagtgggcaacagattctgcccagggtctgaaaggtggagaggtgactggtgaggatgtttaaaagacctctcctctctactccctaaatgggggccatccagtgttcttgaggttcagagaaggcccagggctggggcagcagggcactgtcagctcccagctcccaggggccaggagtaagaccccaacactgtccagacactgattgcattcattttgggggagagtagattcttatttaaagaataatacaaaagtctacaaatatgaacataaacagaaattcctttgctacaattttccccttaataagacattccttcctaatgacatatgtgactgcattcatggctgagatgttttctaggatggtgagagcatcagagtggactatctggtgccttggggtcatgcattttcttcttccaatgtctacaggatcccccatgtcccactttgtagtgtaactcagtgtgtgtcattctggtttttgttgtatagatccttggaaagcccatgtcattcctgctgtgaggtacaggcagccaaatggcatcatctctaaacatgccttctcctggtacatcaaattatggaataaatgaaagccattttgacagatattgaagatataagtttctactcttcccacacatgcttctcccaagtgaaggattttactggtgaattgttattagagattagtgtggatcagtgactctgccaggggaaattttgccctctaggggacatttggcaaagtctggaaacattgttggttgtcagagctgggggagggagtcctgctggcattgagtgggtggatggtgctgaacaccctgcagttcacagagccccaccagtttgaccacccaaatgtcaatgctgaggagtggagagccctgctgtgccctcccgcagcttccctgaagcttcccctcacctgctcctcccatgtctccccaccacttccccacttcacccgcctccttacacctcagtcccctccacctgaactcaccccttagtccaaggccagccctgatctccgctctcctggtctccttgctccttagcaggaggcgcccactagatggcgcccttgcccttactggagctcaccgtctccctttccaccctgagacaaatgtggctgcttttactgccacaaccccagccctccacactctagatttgctcagggagcagctcctggacagacctcagggaccccagggaggagcctcactctggagattttgatggcatggtctttgaacttcactgttacccccagtcaggatccaggatgttgggagtgcatgattctgcccggtcccacttcagcaggaccccactgctgagttgtctgtggggacccgggcctctcatctccttcttgcattgcaggagagggatcttagcactgctttcacataaagtcagataatggaggagtgcaggtgagtttgggaaggtggacatgaagagaggttgtgtccctagaggtggcagcagtgagaggatgggcaggtgggaggaacacagcccatccagggttgccagccatattaggagcgacagcctttcctctaagcctccagcctttttcctgaaacattccagaactttccacttcagcacttcccactgaggctcctcaggtctgtccctgagctcccagctgagcctacctacccatctgaaatcctgagtcctgtgtcaccctcgttccccattattctgtgcagttctgtgggacgcccagctctcctgacacccccagtcttcagaatggccatcagcgctgtcgctgtggcaccagggtgactgccgcctggaggctgagtcctggcttcctgacagctgtggggcccgctctaggctcccttgtcctgatcattcatcacctccaggatgcacagcagctgggccagggggaggagcagggacaggtgtcagccaccctgtgtgtctgcaagtcaggctgggggtgtgggaggacgccaggaatgactgaactttctgatttagagggtgagagcttgcactgatggaatttgggatttaataggaaaagcatagcgttttcctattttgtaggcagggtggctggagtttggaatcatagattcccctgggatgtcactgtggacctcagtcccacccgttaggggcacagatttcagaatccacaccctggggcaaagcaggcatgggaggctccatcagcctggccagggctctctatttgtgcagctgctgcaaggagatgtgcactctgatgggaacagtgctccctcctccttggggggcagtatctagctccctgcagcccctctccctgcaggccctgccctctctgaacctcaccttccccaacccgccccccgcaatcccatctcagctgtaatcccaacactttctcatccattatgggtggactgcttgagcccaggggttcaagactatgctggctggacaatatagcgagttgttgtctctacaaaaagacaaaaattagctgtgcatggtggcatacacctgtagtcccagtcactcaggaggctgaggtgggaggattgcttgagctggggaggctgagttggcagtgagttgagattgtgccactgtatacttcagtgtaggtaacagagcgagaccctgtctcaaaaaataaaagtaaaaaaaaaaaaagaaatatggaatacattattgttaactctaatcaaccatgctatgcaatagtccaccagtaataccagtaatagccaataatgaattatctgaaaaagaatacaatttattcttagctatctactgctaaaatttttaagctatcttttatgatagctgaaacaaaagaagtaaatttaaccaaggaagtaaaagacctttataatgaaaactgtaaaacattgatgaaataaattgaaaaagacacacgcacaaatagaagatattccatgttcatgaattggaagaactgatattgctaaaatgtccttaccacccaaagtggtctacagattcaatgcaatttctgtcaaaacaccaatgatattcttcgaagaagtagaagatcctaaaattagaaaccacaaaaattcctaaaacctgcacaaaacaccctgagttgccaaagcaatcttaaacaaatagaacaaagctagtggcattacacttcctgacaatcaaagcatactgcaaagctatagtaaccaaatcagcatggtcctggcataaaaacaagcacatagatcaatgaaacagaataaaaatcccagaaataaacccatgcatctctagctaactgattttcagccaaggagccacatgcacacaatggggaaaggacagcctcttcaataagtggtgctggggaattggatattcatatgcagaagaatgaacctagaccctatccctcaccatgcacaaaaaattaactcaaaatgtattaaataaagacttaaatgtaagaactgaaactatgaaactactagaagaaaatatagggggaaaatccatgacattggtctaggcaaagagtttttggataaaatctcaacagcataagcaacaaaaccaaatataaacaaacgggatttcatcaaactaaaaagcttttatacagcaaagaaaaaaaaggccagcagagcaaagagacaacctacaaatgggaggagaatatatttgtaaatatatacatatatatttgtaaatatatacatctgataagaagataatatccaaaatatataagaaaattatgtttctgtatagttttatctgactgggatacagaggccacatccacagtcccatcctcaaaggccacttgttcccaaaatgtcaagcacatccctcaatgatccatcatcaacacctatgtctgtaggatgaagggtgaatcatgaagcactaaaaaggaagaaggaagccaatcccaaaacaaaatgatgcagggtctggaaagtccaaagcattttttttttttttttactgcatcttcctcctttcttctccacattcccaatcctcactattgattaacaaaacaaaaaaaactgggacccaccatcttccctactgtcaggagatctagcgagattgtttgagtcttagaccaaactttgccataagccaaatttctggctgactttacaatgatatgagctagcacagtctctttttctgccagtcaacttgtgctcggttttatttgcaaccaaatagaggtggtaaccaaatataggtgaccctaaaattagtcatcaggatgaaatcctaaaatgtgcaacaaactgggttgaattcaggattagtagcaacatctctgttgtgggcttgaaaagggggcacccttttatgcagtagcaaaattgctaaattgttgtttgctgagtctttggactctcatcccggattttctatgaccattcaaacagggctgcaatgaacatctatggttgtttagcttggcacacttctacatttctatatagtaatatctagaagtgcatttgctcaatcacaagatatgcacattttataattgactgctatcgaactaccttaaatagccttaatttgttctcaacattgtttaacagggtctgtttaatgtcctacgtccagcaaggacagtatcacttttcttaatatttttcaaattattggaccttaacaaatacttaatgtgcaattaattgattcctttgtattcccatgccttcttttatatgtttccttatagtacacaaaaccacattattgtttctttacttgtgtcattccaccctggaccattcctatctaaactataacattatgagagagagagagagagaaaacaatatgaaaatataaattgattaatcaaaaaaatttaaataggacaaatcaggaagacacaagagagattttaaaattattcagagaataccacaatagctgtaccaatatattttaaaacttagatgaaacggacaactatctcgataaatgtaaattaccaaaactgactcatgaaaaaatggatattatgaatagagcaataatcagtaaagcaattaaaaagacagttgataatttttatttactgacaacaataacaaaatttcaggtcctgatatttttatggtgaattttaacaaattttcaagctcctcctcaaccaattctcagaaggtttaaaactttaacaagaaaacactttctaacacattttcagaagctgttatagcatgataccaaaaccacacaagaaaattatagaccaatctcacttacaaatatacatgcaaaatcaaacaaaatcttagtgaaccaaattcagaattaataatagcaaacaagcaaaatatgttatcatacgtatggcttatatcaggaatgcaagtatgtttcaacatcagaaaatacttctccacattaacagactaaaggagaaaaacgcttgtttaattatctcaataggtttttagagaattttgaaaattttataaagttatgcgtattctgtaaaattgatgaaatccaaccttgatttatttttaaaaattgcctttcctatagaattataggtaaaggaaacacatgcatcctcacagagctacttcaaggctaagttacttcccataagtaacgtatcctgtaatgtgtgcttggcacatattcaatactaaacaaatatttgcaaatcctcaaaccacttctcgctcaaataacccacctttgtcttttgcctttatgttagggttgattttctcaattgtatcttggagatcctttggtgggtctttcagcaattaccctgaatttgcttttctgtttacaattttaattcctgggaactctttcttgttctctgactgcacccttttcatgagagttcagccatcaatcctccagaaccccaccccccccgcccccccaaaaagcaataaagatgtctaaaagcttccttctgggctttcgaatgatgtttaccccaggcatttgttctattcgttcatcacccattttccctacaacttgcctacacttgatatcagatttttatttattagtcacctatcttcttcattggcccattttcctattttgccactggttgttctcaaatgtgttatgattcctggttgtacagtcaagtggttgataatcttggatatacgataaagatttgctctgtagctgtgtgtaagcctatataaaagcttttgtatttttcttcttaaaaaagacaaaagatggttgggaagatccctccagttcaccagttcgaggctgcagtgagctatgatagcgccgctgctctagcctgtctgtctgtgaaaaacaaggggggcggggggcgggggggaagactggagatgtaaatctcccgcagggccctacccgtatccgcaacaggtctctaacaggaacagcctcaggcctgtgttggaacaaggtaggttacagaaatctggaagccagatctgtaacttcagggtaaggactggctctcagggctgatcccccgggctgggtgtcccagaggcacccgcccccgccccttccccaaggcaggccaggacaccttcactcctctccttaggctccccacccccttctcctccccactgtgcctcctggagtagcggtggcggtgccacaggggagcggggcggggcgggctctgagggcaagggggatgggccccgccggggtcactggcggccaccctggaaactcgacgcaggccggcccttctagtgaatcgtcccagccacagctggcctcccagccgcgcttggggcgcctcggggcgcgaatggtgcaggttggggagactcaccacgcaccgtcgggggtcggtccggttattcctcaccgctcggctccagtgggcgcgcgggcctctcctcctcagttcctgcgctgcagtccctccctcacccttcgcagcttgggaatccaactgtgtcattccgacggagcgccgtgaggacctccgagggtgttagcgccaagtgatctctgtccagcgctctgaatatccaagtaaaggagttcaatgaagggcgggtcaacggaggagaaaccgtgactctctcaagggagcccaaggcctccttgtctaattagtgacgcgccaatggatggaggctcttcccaccatctcttcccagcatccagtgacaccaccgccaagggacgggctcggcggaacctgcaggaaagaagcatcggctgagcctgactgcagcgctgtgaagagacaggggaggggatcagtagttggtcccgcgcccaccccctgtttccgcgaggggcggagttgactggccatgcaggcagagggcgaaatgtgaaattccactactcctaccgtttttccctgacccgatggggcggagtgtcgtcaggctaagttccctggcggtaaggtggggagattgaggcgcacacctgccgaacggtaacgcaggattagctaaggcgagctcaggacagaagcctcccgaggagcaggagggcaaaataataaataaataaataaataataaataactcactccttggtctttatttgcggcaggaattcagaaggtgaaagcggggccttaggatctttctgaccttttgggttttaagcaggaggtgtcagaaatgttaccacagggctagctggcttgtggccagcaagcgttcacaatgccctcgatttttcatccctctctgtgggttctttttttcattgtaaggcagaatttctacgattgctcacccactcagagaacctgagctggtttagaccaggtgagacaggctaggtttaccctggtgatgatgtgttgttgccatggcgatcctgcccagtaccagaggccctgcagattcagatgcttggtgcctgtgcttggctgaggggccaatgggtgaagctgccatctgcgggatgatgactgaagcctctaagtcagaatccgcccaggctgagccttagggcagctccatggagcctcggctggcctgggatagagagtccaccactgtgccagcccccagccactgcctaggtcctgtgctgagagccccttgtccagggaaatggcgtccagtggaaaagggaccacccccttgcccttcactcaaggcaggttggtgacaaccctgaagctaatccgttcctagaggagctgcttctgggtccgagttttctctgcagcagagcagctccctggatgggatctgttcaaagtccgcctttcacgcggaattttccgtccttgcaattttccacctccaccactaggggatcctctctgaccgcctcatgccggctctggcctctgagcaggggtttctcttctgcatgtgcgaccttgcgcatgcctagtggccttttgggacctagagctgctccacaccccgatggggttacagagtgcctcgcctccactccaccccaccagggttccttccctggctgggatgggatttcagaagcgccgaggaacagcccagacaggtgtgggagagtagccaaggcccctgtcccggggtggccaggacagcggtggcctcgcataggacctggctgggctgctgcaatcagtgtcctgccccttggagagcaacagtgaaaacaacaagactatcttcacccaccttaagaaagaacagaaccagtatccccaactctgctgtgtatcccaacccaattccattccccaccccactctcagtagccaatatgcaaaatattagaatactcttactgttattattttcaaccacactctgcatcctgaaaaaccatatatttcgttatgtgcttttaaacttcttgaaaatgaaatactgaggctgggcgcagtggctgacacctgtaatcccagcacttcgggaggcggaggcaggcggatcacgaggtcaggagatcgagaccatcctggctaacacagtgaaaccccatctctactaaaaatacaaaaaattagccgggcgtggtggcgggcgcctgtagtcccagctacttgggaggctgaggcaggagaacggcgtgaacccgggaggtggagcttgcactgagccgagatcgcgccactgcactccagcctgggcgacagcgccagactctgtctccaaaaaaaaaaagaaaaaagaaatactgaattttcaaatacttgctttttttttcggtcaaaattatgttctcaaatttcactcctgtagatgtgcgtggctggctgtagtttttgcatttttattattaggtattctcctgttgcattaatatgccacattttatttctctcatgtttttggtgaccacttggggtgttttttggttttgtatttttgctgtatacatgctgccatggtggacatacctctttatacatatttcctgttgtatgcagacacaattttaggatgtgacatcttcagcttttctattgtgtcgtgtgtcttttccttcgtgctttgtgttatttacatattctggacacagattctttgtcaactgtatgtgctgcacatctctttcccagtttgtgtcttcttcttcttttttttttcttaaaaaaaactttctttatagtgttttttttttctttctttctttgttttgttttgtttttttgagatggagtcttgctctgtcacctaggctgaagtgcactggccgatctcggctcactgcaacctccgtctcctgggttcaagtgattctcctgcctcagcttcccaagtagctgggattacaggtgcctgtcaccacacccagctaatttttgtatttttagtacagatggggtttcaccatgtttgtcaggctggtctcgaactcctgacctcaggtgatccaccctctttggcctcccaaagtgttgggattacaggcgtgagccacagcacctggcctgtgttctttcttaagtagatgttacttttaatataatagaatgtatcatattttgcttttatattagtactttttctatctaattcaaacacatccccaagggtctttgtgtgtagactgaccaatttctcaagaatcatgaatgaatactgcttctctttccccaatttatctgtaatgctacctttattataaagtttctatgcatgtgtagaaatagttcctgatttttcactctgtgccaccagcataccaatagcacgctgtcttaaatattaaatagcagagctttatgagacaacttgatgtgcagtaggcaattgcccccttgttactcttcttcagggttctttgttgtaccacatgaattttagaattggcttgtccagctaaaagacaactgcaaggattttatttggaagttcataattctatacataatttggggaaagtattttcataataccaagtcttcctattaatgaacacagactctctctctctctcccccacccccacctgtttagttatttatatctttatggtctgttagttattgtttattgtctttcaaccaggtttcatgtttttctacatagaggccttgcatgtgaaagtctttcttcctagcttgctattacaaattttttttaattgcactttttgggtacagtggcttgtactgtaatccccgatacctgggaggctgaggcagatggattgcttgagtccagaagttcaagaccagcctgggcaacataatgaggtccctgtctcaaaaagtttgttttaaaaattgcatttgctgttattcaacaaatgtcattgtgtctcatatatggatttttatatctgataaccttgttcaacaatcttttgattctaacaatatatcagattcttttgagttttccatatagacaataatgtcatctgtaaattataattgtttcttctttgttatttcttggaccttttattttatatttttgtcttgctgcaaggcaatatccctctatatattgtggggtcttttttctcataaagtggggatggtgaacacccttgtcttgctctctgattgtataaagcatgctttctgtagcattttgtagacgctcttttttagattgaggtaattcacttttatttctggtttactgagtttttagcataaattcaggctgaatttgagctaaagctttttctggagacatcatttgaaaaattcatatgatttactttctttaagtcaccaaagttatgatttacattgaactgagtttctactgtttaactgtattcttgggagaaaacccacttgtcactgaacaatatctgttttatttactgctgtcttgtgtctaaattttcttttaggattttttgtatatgctcagattagcctgttattctcctttctgtatttttttctggtttgggggtcaaagttataatagcctcacaataagagctaagaaaccagccctaatggaggccggggcaggaggtttggagttcaagaccagtctgggcaaaatagtgagacccccatctctatgaaaaatagaaattagccaggcatggcagtgagtacctgtagtcctaggtacttgggagggtgaggcaggaggattgcttgagcctaggaatttgaggctgcagcgaactatgattgtgccactgtactccagcctggatgacagagcgagaccctgtctcaaaagaaaaaaaaagaagaaataaaaaggaaaagataaaagagctaagcatctgtttccttttttccattttctgggagagtatgtgtaagactgtaattaactgtttcttgaataatgggagaactctgtaaaataatctggctttggtgttacctgtattggaaggatgaaaaataccaattcagtttcattattggttgatagggctactcatgctttttgttttgttttgttttgttttgtttttgagaggaagtctctctgtattgccctgttgtccaggctgagatgcaacgttgttcacaggcctgatcctggctcactacagcttctaacttccgatctcaatagatcctcccgcctcagccttcccagtagctaggactacaagcatgcagcatcacatccagcctcttttcctgcctgacccagttctggtttcctttagttttctaggtgttcatccattttatctaatgtttaatgcatttggcataagggtgctcagtgtcctttcattgtctgttgtctgtaactgttgccattttcattcctatttatgagtactggcgtcttctctcactttttcttaataatcctgctggaactttgctttttaaagaacatcttttgacttgttgattcttttttcatacatattaactattttcttattttttgcctttatatttatttcttttcctgtttgaaacattgctcttttcttactataaaaatgggtaagtagctcatgaattaccacctcttttaaaaatcttttctactgtaagcattttagcagtttacatttgcccacaagtaccacttcagctacaccctatgtgcttttacataaagtcttcatttttggtaagacatattctcaaattttaattatcacttgtttttaaatccatgatgttttatttgaaatgttgtttctaaagatacattttctggttatacttttattcttctaatttagcacagtggccacaaaacatggtctgtgcagtgcatacaatcgatgagtaatttctgagctgtagtatttggcataatatatggcaaaatttcctaagttttccatgtgtgctttaaaaaacttccagtaaaatacataaatctgttagatcaagcttctcacattgttcaaatagtctatatgtttactgattcatttgactgcttgatttatcaattacaggtaggaatgtattcaaatctcctattaaagtgtgacactcaagtggctttttaaagacagagatgccaaaccaatgaatacatgattttccccaaagcctgcacaaattctctaatgaaattttaccatgaaagtttgtttaattaaggcttactaaagcagtatgttgtcttttactttttaaacagagaatatatattttaatacatcgtttaagtttatgattaattatctattactgaggataagaatctttgcctgtgctcattcagcatttgcacttcatttatgatctgccttctcatagcttctgttaatttttatactagagacatttatttgtttgtataaatgttgaaggtttttttttgttgttgttgtttttgagtcagagcctcgctctgtcacccaggctggagtgcagtggcatgatctcggctcactgcagcctccatctcctgggttaaagtgattctcctgcctcagcctccagagtagctgggactacaggcatgtgccaccaagcaaggctaatattttgtatttttagtagagatggggtttcgtcctgttagccagggtggtctcgatctcctgacctcatgatctacctgcctcggcctcccaaagtgctaggattacaggtgtgagccaccgtgcccagctgggttttttatattataaggagatgtaatagatagatagatgtttcaaagatagtcaaatgtttttaaaatttaaaacacttttttacaggttgactttcaccatttaatttcatctatgtgttttgccttagagaaattttaaatgctatgtagatctcatgacttataattatgaagcattttgttttctgttttccacgaaacttagcttaactttgagcatataatagttgtaaaggtaggagagtaacactgaaaaaaggaattgcataaaaatggcacattttctgtagagttgtttatcgcctgaaaataggccccatttcatggaagtaagatgatcaggctcaggtccccagacgaaactcttggcatggtttttggagatagtccagggctcagtactggctctatcatttgctacttctcccaaagtaaccaatatctcatccaccctgagcccatttccatatctctaacatgaggataatagcatctaccttacacaccaagtagagggatcaaatgtaggaactaaatcaaagtaccagcactgaataacctacatcctcccacttcccaaaaggaagagagatgtatcccctgttgacaaacgagaccattttgcaggagagaaaggaaatgccagttcacttgcaatgtaaacatgctctctctttttagggatgtccagggacctgagagagaacccatgcttaccaaagagtttctagttccagacacacaggactcgaagggtgacaagtatggttttcagggtccctgaatccacccagtcctcacagaaactcctaaaagctgtcgattgacagcgttgagttcacagctctggtcctcacatgctgatactgcttgtgatatcgaacccgacaggaccccacatcacaattgatttaccaactacaatataatacctcctgaatctccaaattggctcacccaggaacaaaggcttggggtaaaactggattaggagatataagctctgaattttctgagggtgagacacacaaggattctaagtgacacgccacagagtaacgggtctgtgactggaggacccacagatttgtcttactggagacaccacatgcacacaaactccatccttagctgtggaaacaagggtcttttgctatcttagccgaattctgggagtaatttttggaggggaggagatctttgggattgcctctttcaggccctttacaaaaatacctacttcttaaatggtaaagcttacactaaactgaaaaaattacatccttggctttttatgaagtaggtgttggattgaatcactactggaagaagtatggcatcgcaaattctaagcagtggtcaaaggatggatctgttaaattagaaaaatctctaaatttataaaaagattttagattcctttattctaaacaattgacctatttgtactcatgggacaatcaaatttcaaaggagatatgtaacgatttcatggcttgcattaaaaatccttctgataaaattaaagataaaaaatctgaccccctgccaaaaaaatcttttgaagttcatactgcctgctttcaatattctgtgggattcacaatgaaaggtgccttatattgtggcctagcttcaagtttatgccttcgccaccatggcctgggttcaattcccagtcagggccccagcgcctttggtttaatgtttgcgtggcatttgacttttttacctatttagtattggtgagattacctttggtaaaaaaaagtttaaagagtggaaatcgcaattctttgtgttggctaaaatctgattataagagatctggaaggttttatttttctttttcaaagagctctatggtcagaagtcggcttcatgaaaagctaatatttaattatatgtacatacagtctttctggattttctcttttgcctcctgttttgaaaaatatttggatttgagtgaaactccgttttagaaattaattgcttggtacaatatacccatgtaactaccctgcacatgtaccccctgaatctataataagagttgaaattttgacaaaataaaattagattttgaattaaaacaaataggtgcttggttcctctgctcacttctttttaaaaggaattcctctcccatgtacttcttcttttcccttctttaccttccttttggcatctttggtatcacatgaagggatctagagggaattttaagtgactctgaaattccttgagaaatacacaaaaagatcccactcaccccttttgggggtctcctgttctccttgtggagtccagagtcagggacaggctcctccaggtctgcagctctgctctcttttatttcatcttggctgattgctttggttttgtgagtaccaggcattactttgtactgtgagagacacgtcctttgtgagtgcaacggctgctgggtcactggtgagggctgcagtttggagatggctgagagccgttgcaataaatggttgtgattgcagggggctccttgtttctttgcaagtttagatgagaaaggtgcagtttggacacagtttaaaggctgtgaaaacaccaccaatgaatatgatttcctttggggatggtctgattaaaagtgggctgattgttgctgtgctactagccttgaagacatgtttctacagcattgtgcagtgtggaaaaattgtgtggcttggtcttgtggcatgtcccttcttttagagacctcagattcaatgtgaaattcgggatttttgattttcaaagatctagatgccctgccttccagatgtgcctactcttcacatattttaaaattagatcctataaactgcaaatactttgttggcttctgtgagatcagaggtccagttagaaaaggaagacagtttgttaaaattaaaaactatttatctaatctaactagattggcctccaaatatgactttctgacattcagctggttactctgaaaagatttctaaatctcttgaggctcatctatatgtttccttgcaaagaaaaaaaaaaaaaaaaaaaagcaagcccaagcactagtaagaaaaagatttgcaatgtttcatgaaaggagtagatgagtgaagcatttatttgtagatactgggttggatacctgtgcaaagaagaagaggtcaataataaaaattgccaggggatttcttggaacttaacaagctgaattaaatatagaaatgtcaggaaatcaaggcaggaaatactcacttgtggttaggcagacagggcagggttctgagcttgagatggagcaaacagttgtggtgggtgaagttcacatgctttagagctcagctgtcctagtaaagaagcctaagagtctctaaagctcttatgagaagatggattttttttgcctagattaaaaggttaaagaattgctttaagttggataaaataaagctaaatgtttaagcaagttgtgaaaggtttatgaaaaaattaattaaaatatttttgtgtgtaaacatattgactaaagttgaaggggtataattcagcatttctgtaaattgagcattgaaataaaaacacaatgggtttctcttagagcactaacctgctctttaacaaaaattgtaaagggttatagaaagtctataaaaatgttaccttatggtcaaacattaaaattgggtaaatatgtctatcaggttttattaagaattaggtttaacattaatagtacactaatgtaaaggtgaaatttggcttatttggtacaaaaatcatacaggaagcattgtgaaatataaaatgatttttagctttctttgggctatatttctataaatatgttattgatgagggttccaaagttatgggagactcctataattctgctatatctcagtgtacattatcagtcataattataattgtcatgttaaattattgtgggccacagaggtaacagatttccttgtcaattgtgtctttgactatgactaccctaaaacgttcagtcacccatatacacatgttaccttgttttggccctctttagaaggtaattttataatcagctataaagccctaacaggtgctcttaaatgcaaattttgataactttggagattgtgacatcagaagagaggaaaaatgttcgggacacttggagagctaaaatgttcattgatatcaagcaggacaggaattaactgcatgaagtgaactaataggaggctgaagtgatctttttgactttttgcttaaaacgttgctgatcctttgttttgcttttcagagtcaaggcaaattttcttttgagctattgacagcttttaacgattaatcaaaatatactcctatgaacaccatttggagcattatttgtttctctctacccgatttccccagaatttggaaactatttgtgggtattcttaatttatggcaatatagttatttgcataagtgcaataagaatgtgttttctttggtaacaggacacaatttgaaaaactggttattttaccaaggttttgaccagaatgctgtgctttcctttaaggaatcaaacttgacttgtggagctaataaagcctttggaaaactgaccttatatcctgtgaacacagtccctgtacagggttactgatctgtgggaagaaaagaatgtcacattctgacaggtcaggaatcccaagttatcttgaaacttcaagaggacaggaattcacccaaccatatgtatttgatggtagaaatccatggcaggggctcagctttaaaaagtcttatctcagattccttctataaaacaaagtcccattaaaaccaattttaaaagcctatgtgaaaaataattattcttgctgcacctcgtacaaataaagtggcaaagcataataaagcaaattggtcctgtcgtaatttgtctttagtaaaaacgggaaactggggtcgggtgcagtggctcactcctgtaatcccagcactttgggaggctgaggtgggcagatcatctgaggtcaggagttcaagaccagcctggccaacatggtgaaaccccatctctacaaaaatacaaaaatgagccgggcatgatggcgggtgcctgtaatcccagctactcaaggggctgaggcagggaagcggaggttacagtgagtcaagatcgtgccacttcacgacagcctgggtgacagagcaagactccatctcaacaacaacaacaaaaaagggtaactggagagagggaagttatgtttcaaaaacttttggaaactatagtacacctgtttttaaattctagtctggcattcagtttttattattttctacagtttgggttaaattcgtatttctctggctacaagtctcctaaataatcttttcatttgtttcctttttctttccctttttccccatttttcttaattggaaatcactgaaacctaagctgtgctttcttaaagccctgtgaactgaagactagacaaccgaaacttctgaaggaagtagcagcaacctatttatatgtgttgctgttgcctactattatgttttagcaggtgctgcctctacacccccgaaacagagagtgctactgggaacaaatcgactttttccactccagtgctgcattcggtgccccataacgatgaccccctctcagcaggaagtagccagaaagattacaatgctccatctccctatgattcttgtgataaataaatatacaagcatgatagaaatcatgcgcaaattgacagtggggattgtggcaggccagatttcactaatggaggtccccatcacaactacttcagtactgactgagtggttaagttcagtatcaaaagctgaaagtgccagcgcctttctacaaaggctagaatgtaacaaaagcccaccaagggttttacctaggcctttcctgggccttacagcatgacaaaacaaagaaggaattcttaaccagacctgtttaggattaaacaaatttaattgggggtctgaagaaactcgccaggcctccacaaacaagttcattgggggtctaaaggaaccccccccaaacctctgtgattgagcaggagacaaggtcagggtaattgccccagcacctggactcatttagatttaagtaaatgtactgaggctccagagaaaggtctccaagacttagactagagttacagattaaaagaagttaatcacttatatctttagataaatgcacactgacacgtagacatacatcttagaaaatatataagctctggaaaaccttgtaatttacagttggtctggagatattttctgggccttctctctgtaaccggttccagaaataaaaaactctcttcctccccagtttatctgcatctcgttattgggccgtgagaaatagcagccagaccctgagtttggtctgggaacacactggctgggcttcctgcctggcggtagagcttcactgtcctccttcccagccaaaatgtggcccttgaaggcttcctccccaactgaccggttttgggttctaggtactcagggaacaccgtcttcaaggaggccattttcatactgttcctggtttgatttttctgaaattaggaaatgccccttgaggcatccaggattgtctttatttcccctgaagcttcccctcctgaagaaaaaagttctcaaacaccctcaggactcaaaccccaagttcaccctgtgaaacattcccatttcctaaacccaggcaggctcatggccctcagcctctcagaccccatggaaacctcctcccccacttcacgggttctctccatattgagagcctcccctcctcggcacacaacccagagactcaccccaacatgtgtagcaaatcaccctggaaacaatcatggctgaacgtggtagcccatgcctgtaatcccagcactttgggaggcccaggaggtggatcacctgaggtcgggagttcgagaccagcgaggccaacatggtgaaacctcgactctactaaaaatacaaagttcactgggcattgtggtgtgtacctgtaatctcaactactcaggaggctgaggcaggagaatcacttaaacctgggagacagagattgcagagagccaagatcgcaccattacactccagcctgggcaagaagagtgaaactacatctaaaaaaaaaaaaaaaaaaaggaaaaggaaaagaaaaaaaaaatcatgaggcaacattgcatttaacaatattttatttatcaaaagacacttgtctttctcaggtaagtgaaggtctagagatgaaacgagtcccgatgtaaattgccccatgggcattgctgagatcacaagatcatcactgcagcatgcagcacaatagtaaatttctcaggatggaagttcaacaatccaaaaggtagtattttttttcatgatgctcagtccatcatacgaaataaaaataaattccttttcatgatcatccattcagtagaaaaaatgatagtaaatttgttctcatgaagatttttaccgtaacatataggatttatcgttattattattattctttgttttttgtttttttgaagcggagtctcactctgttacccagtctggagtgcagtcgtgcgatctgggcacactattaacctccacctccagggttcaagcatttctcctgcctcagcttcccgagtagctgggattacaggcatgcgccaccacacccggctaattttcgtatttttactagagatggggtttcaccgcattggtcgagctggatttgagctccggacctcgggtcatccgcccatctcagcctcccaaagtgctgggattacaggcgtgagccaccgcgcccggcctcaatttatcattattcacgcatccacaaactgggttcttatattttgtacgtgattttttccattgaggagagatatctgtgcatattcatgctgctcatatttcatccacaaactcggttcatatttcatccacaaacataattttttccgttgagaagagatacttgtacatatttatgctgttcaaattcacatttcatcattcttttacaagaaatagataatgtattttaaggttttccagtggtattacagatattttactgggtgtatagatagaaattaaaccaaacttctttgttctggccgccagtcatgcatcctgttttcaacatagttcacatacaactggttgtgtaaaaatgaaattattttgtttagtacaatcatcaacagttggttgattagatttttaattatcaagttaatcattgtcattatgcttctcatcgcactcgtcattaattgctgtgggaggaaatttgttatgttccctatgagagggtgtatcacaaattcaaataagaattcaacgacaatggactgtataaaggaaataagcaagtccatggaaaacatatttttttccggaaaggattaaaatatttttaaaaaggaattaaaaaaaaattgggcacggtggcaaatgcctagagtcccagctgctcaggagatggagacagaaggattgcttgagcccaggaataagttggaggctgtagtgaacagtgattccaccactgtactccagccagggcaatagagggaaaccctctttctaaaaagacaaaaagaaacaaaacaaaacaaaaaaacaccacatcaaaaaacccaacaacaaaatgaaaaaccaaataacagcaatacaattggagctattcgatccaaagaagtaaatgaaacataaagcaaataaaagagaaaagctaatacctgtgtcctgcaggactcagtccaagttctgctctgactccctcctggtgagccaccccttaaaaagtcacttggggcggggttactttgacagacagtcttctgtcaaagagggaggcggtaaatagcacttttttttttttaatttaacgcctttccaacaaattagcggctatgttgtctaagagtgcaaatgtcagaggtgggtacaggcagcaagaccctccccacaggggcagcagaaggaggaatgactaagggaacaagactttagtgtgctcaactacacaggacaggaaacagatgctttttacaaaagctggtggacttgaaggcagaatattttcaagttcctgtaactgcgaactatgacctgtagcctgtgagagtgactttctgtggcaaaggagcttttgtgaatgtgaggaagttaattatcttaacagtgggaggttctcccggcttatctagctagaccctcgtgaaatcccaagtgtccttaggaaggggaagcagagagagatttgagtccagaagaggaagaaggtgatgtgaggcccagtaggggaacaaagggcgatggcatgtaaacacttagcccccagaagtgggagagggctggggttcatcacaccagaatccctaacaatcagccttattttaattacccttgaaatggaaggaggccttagagagccagaggcttggaggggcaccctctgctgcatacacagatcccaactgctgtgggctccaaataattgcaccagggaaatcacaaattatcaaaaataaaggatgtaaagcttttaaaaaatattaaaagcccaacaaataaaaaaagttctaaatctataaaattgacctcagtctgtatatttagatgagtcatgtgtatatagcgtttcacttcaaaatatatgataaatctctcattcattggcttaaaaataaacacttcaatcaagtctttatcagaaaaattgaaacgttaactcaattgccttttagttcatgtgactttacaaaacttaaaacaataaagtcagttttaaaaattattagtaaagtaaaagaaaaatatcttcacaatgtagacattttgtccacatgagacatgtgaaatattgccattactaaatatttgcaggtcaaaaactgtttccaaaacattttaaataatcatctggcctgtctgttttagagcattcaattctagctgaggtctggggacatgtgaaaggagccacggcccgactccgtgctgggaagagtcagacattttccacagctctgtcctttgctgtgggctctgcaactcctaccaattaaaattgcttacgtttttgttttatttttactaaagaggggttcctaaaagctaacattatactgagtatatgtaactaaaactactaagaaaacaatttcacaattatacaaatgtgccaagtaaatgaaaaaataaactgtattttaataaaggttataaaaagaaaaacatatagtggtgtgaggactgtctcaggtcttcactgagcaagggatcatgacattctatggcggacagctgaccttggctttctgctcctcttgattatgtctactaagtgacatacttactctttttccacctgtcttgcctctaagggtaacaggttttatgagatccctcctagtgctttgcaggtcagcctccctttgctgcattccaattttactgcctataccctccagctggcttttgatgacaaaagtcctggtcccagccattctcagattctgtcatccccgtgggcactatggagctcagcactatgggaggttccccaaaaatctcgttttctatgaggaatggccaccacctgcatctcagtgatgctagtgacccctttcctactcctgtgctcactggtcctcatgaagatcctggttggtctgtagccccctatttttcctattaaagagaaattacagtaagacccatttgtgtgcaaaatcaattttaggcttattacacttggcctgataatttgcataaaatgcagcaagaattcatcggccatataggctacttttgagttaattttcctgggtttttacctaaaaatatactattttggttagagtcttgtgaaaataaccaatgtgttcaattgttttattttaaaaggctcttactgaacactataaatatgtataagttgaatatacaaactatattgtcataaaatcacaacccaaaatgtggagaacgcagagggaaaggtaaatttgctcgcaaaaacatacttcacccaaataactggaaaaaaaaaaagactttcatgacccttctttaaccagagcagcagctttcaaacaaggtgtttgccttggaaatgccattcacaagccaaacggcccttgagagctgtctgtcaggcactgtagaatctagcagctcctcacagagttagaaatagtttcaggaaagagattccctgcttttagtaactgcactttatattcccagatagcgagattgtatgtaaaccatttttatcttattctggaactcttttgggtactttttttttttttttttaaatgatggagtctggctctgttgctcaggctggggtgtagtggtgcgatttcagggtatgagaaaatgcagctggacctggctctttccaggaagaccctcacagccaaggagtccaaagcctggggttttcatctaattccagtgtgactggggtaggagcagctttggtgctgggtgtgtgtgtgtgtgtgtgtgtgtgtgtgtgtgtctatgcctgtgtctgtttagggtgttaggctcgtggttgtctagatacaaatgtcccagggctcaggagccccagggttatgtcaggggcaccagatgaaggtgtcaacagaagttagggcacaagggacaaaggtgagagcaaggttagattcatttaggtgcaagaaatcatagagggaggagggagaggaagccctcctgctaccaccgaggaagaagcgcagcttaaggcagaaagcctgtccggagaggaagtgagtttgagggcagggctctctgggtaaagtacggtctgggacaccagcctgggggaagggtacagaatgcagagtggcctggcgtggggactaagaacagaggagagcagctttcactgggagggtcagtgttttcagtgtccagcactgagcaaggtgagatttgggcagcttgctgtgaaataaggtcaggctctggcattgtccccattgcgtgtgtgtgtgaggggcactttgggagagtgaactctccacctccatcctctcatacgtccttcaaccgagcttgccagttaccctgattccaaggagatctatttattgttgacaatactggatcctagcagaggctgggtaggagcctgggcacaagcaagtggaggagggggcctgggcctgaaagacctgggaggtttgagagaggacacagcccacagaatggagcagatggggtagagtcggcaagcattcagggctcctagtaagttggacaatggagaccctgaaagatccagtaaaacggggagaacaaacaggtccccaactcacatccttgcagtgcctggagcttcagactccagacaggtggggaaggaaaattgagggatgtgaacatgttggagaatgtcgtgccctgaagaatgaagaaaaggggggtgaggaatgagagcaggaacggcttccagtgcctggtgcccaggagaactcagaaaatgggtgtggtggagaggaatcgaggaaccggaagtggtggaagtgtgcagggcccctccgagatcactgtgactgccaggcgtcctccctggctggagagcttcactgtcctccttcccagccaaaatgtgtcccttgaaagcttcctccccaatggactggttctgggtcctatatatttgaaggggtggcctgcctctccacacctgtgggtatttctagttgggtgggaggagagacagagaaaagaaataagacacagagacaaagtataaagaaacaacagtgggtccaggggaccagcactcagcacaccaagggcctgcaccggcaccggcctctgagtttcctcagtttttattgattattattttcattatttcagcaaaaaggaatgtagtaggagagcagggtgataataaggagaaggtcaatgaaaaacatgtgagcaaaagaatctatatcataattaagttcaagggaaagtactatgcctggacgtgcactcaggccagatttatgtttctctccacccaaacatctcagtggagtaaagaataacaaggcagtattactgcaaacatgtctcacctcccgccacagggcagcttttctcctatctcagagttgaacaaatgtacaattgggttttacaccgagacattcagttctgaggggcaagcaggagacagtggccttcctccatctcgactgcaagaggctttcctcttttactaatccacctcagcacagaccctttatgggtgttgggctgggggacagtcaggtccttctcatcccatgaggccatatttcagactatcacatggggagaaaccttggacaataccccgctttcaagggcagaggtccctgcggctttccacagtgtattgtgcccctggtttattgagactagagaatggcaatgacctttaccaagtatactgcttgtaaatattttgttaacaaggcacatcctgcacagccctaggtcccttaaaccttgatttcatacaacacatgtttttgtgagctccaagttgggtcaaagtggctgggtcaaagtggctggggcaaagctacaaattaacaacatctcagcaaagccattgttcaaagtacaggtctttttcaaaatggagtctcttatgtctttcctttctacatggacacagtgacagtctgatctctctttcctttccctacatatattcatggaccacagtcttcaaggagtccatttcctcactgtttttggtttgatttctctgaaattaggaaatgccccattgaggcacccaggattgtctttacttcccccagagcttccactcctgaggcaggagcttctcaaacaccccccaagactcaacacctaatttcaccctctgaaaccttcccatttcttaaatccaggcagggtcatggtccttagcccctcagatgctgtggagaccttctttccctttcatacattctctcaagattaaaagccacccctcctcagcacacaccccagagactcaccccaacatgcattgcaaatcaccctggaaacagtcataagaccacactcatttaataatattttatttatcaaaagacactctttctcaggtaagtgaagttctggagaggaaaagaggagtcctgatgtaaattgccctgcaggccttgctgagatcacaaggagattgttactgcagcttgtagcacaatagtaaatttcttctctggatggaagttcaacaatccagatcgtagtatattccttttcattatgctcagtccagcaaatgtgatgataacaaattccttttcatgatcatccattcagcagagaaaatgtttgtaaatgtgttttcatgaagatgtttaccataacatacaggatttaccattatcaatgcatccacaaactctgctgttgttttttatacataattttttccatcgagaagtgatagttgtacatattcatgctgttcatatttcaaccacaaactctgctggtttttttatacgtaattttttccattgagaagtgatacttgtacatatttgtgctgttcatatttcatgtttcatcatccttttacaataaataggttatattgtattttaagtttttctaactgtagtgcagaaattgtactgggtgtatacatagatatcaaaccaaatttacttgttctggctgataatgcatcatttatttcatagattatgtatttctttgacacatttcacgtacaactaattgcataaaaatgaattttcttttagtatagacatcagcatgtgcttaattcggaatttaattgttgagttaaacatcgtcattgccttttccgttgttattaattgctctggtgggaattttgttatctcatacataagacagtgtgccacaatatctcttaaaatttcaatggcaataaactttatatttaaaaacagggaatctatggaaaacacatttttttctaaaggattaaaatatttttttaaaataattttctaaaaagttaggcacggtagcaaacgtctagagtcccagctactcaggaggctgagacaggaggattgcttaagcctacgagttgggggctgcagtgaactgtgattgcaccactacattccagccagggcaatagaagttaaccctttttctaaaaaaaaaaaaaaaagaaagaaagaaagaaaaaaagcaacaacaccaaaacctcaccaacaaaatggtaaagaaaaaaaaaacagcaatacaatgtaagctatttgatccaaagaagtcaatgaaatttaaaacaaatgaaagggaaaaagtaatacttgagtcctgcaggactcagtccaagttctgctgtgcctccctcacggtgagccacccctttagaagtcacttgggtcataagttaacccgataggaagtgtcctggccaatgaactagggaggtggtaaatggcaccattttaaatttaaattcacggccttttcaacggatcagtagccatgttgggtaagagtgcaaatgtcagaggtgaaaagaggcagcaggaccctcccctagtgcttgggcaacagaaggtggaatcactaaggggacaagactttagcatgctcaagtacacaggacagaaaacatgctttttacaaaagctggtaaatatgaagagggaacattttcaagttcctgtaaccaagaactaccgcctgtaaccggtgaaagtgactttctatggcaaaagcgtttttgaaaaggtgaggaagttaaatatcttaatgttgggaggttcttctggtttatctggctagaccctaatggaatcccaagtgtccttatggagcggggagcagagagagagatttgagtccagacgaggaagaaggtgatgtgagtctgggtgcgggacagggggagaatgatgctatgtggggatctgggctggggaatgacttagctgcatgagcggagtgacttagactcctgaactagaagaaatctagggctcatcacctcagcagccctaaccatcaaccttatttttattacaggtcttccatcgacggactccctaaaaagccagcggcgtggaggggcgccctctattggacaaatagatcttgactactttcggccctcaaatagcctgactaggcaaataacaaataataataatttttttttaaatcatggaaaatattttaaaaaacaattaaaaagttataaatctataaaatctgcttctgtctgtgtgtctgtatatttagatgtctcatgtgtacataatgtttcactaccaaaatatatgatgaaaccctcattaatcggcttagaaaactaaacacctaaatattttctcagaaaatacaaaaactttaactcaaatcccttttaattcacctgactttaaaaatctttaaaaaataaagcatgctttaaaattattagtaaagtaaaattagaacatcttcagaatttagacatttggtttaaattatacaggtcaaatactgcccttagtaaatattttcaggtcataaacaactcctgtaatcttttaaataattgaattacatgtctgttttagagctttaagttctagctaaagcctggggacaaatgaagggcaccatgccccctctctgtgctggaaagagacattttctacagctctgacccttgcagtaggctttgcaactgctacctatcaaaattgcctacatcctaagtttattattaaaaggagttgcttggagttaacattataatgaatatatgtaactaaaactatttctcatacaaagtatatgaaaaagtagaatgtatttttaataaaaagttataaaaagacatgaacatgtagtttttataaaaaacagtaattttgtctagttttgcagttctaaaaagttatgttaaattcaaaaataaaaaataacaagacaagactcaaggtttaaataagttgtaaaagatttgtaaaaattagttctataaaaattttacaaaaaaaagcattggttaaaatttaaggaattattttgtttttacagaaattaaacattcattaaaaacactctgatacaaggccttaatttgggttcatgtatcagaatagcagggttttcttagaatattaatctattctttaaaagaactatgaatgttatgcaaactttataaaaatcttaccttagagtcaaactgattaaaattccatagattttacgtaaaattttattaaaaattaacttcaacaaaaataaaatttgattttctcctttaaacaaaagttttgcgtaatattaaataataaagcatttttgtttaccttttaaactataaacacacacacacatacacatacaccaacactaaagtcagctgacctcatactgtctttattggatattcttgtttaaaaaactatcttctttggaaaataaagttttttattttaaaccatattttaaattatcattttgactaaatccataacatacagtgatctgtaataattctattttataatatcaagtgttttgaagaactccaggaacagccatgagagaacactgtggtttagtaacactttatttcctcagtttgaaaatagttgtctttcttggggaggccggtttcagcagatgaaaacaagagtcatgatgaaaattacccagcagtggttagtgtgaccataggaacattgtcatcaggtcagcagaaaacatatcagcaaatttttctcatactggcagtgtgtaggggtggatgtttacagttcctgaagccccagtggtcgtgtggtcttttagttttgccatttataggcaacttgtggtaactagctcaattagacacattccttatcacaaggacagagggctttctgtatcctagggttcttgccttggcattccagaagaatcaggtcacacgtggacgtggagaatgagtgcaaggttttattgagtggaagtagctctcagcagatgggggagccagaaaggagattggtttctccctggattggggccgttcagcagccctggctctcctctgactgccccaggcaaaatccacatcgttctataagtcggtgccctgctggtgtgctggtgcctgttgtcatgttcctcttcatgtccagccgcctgtgtgttcctccgctgatgtgctcctctcgacgtcaagcctcctgtgtgtctgactgctagggtcttggggtttttataagcacaggatgggtcttagcaggccaggatgatcttgggaaagacaacattcggtcaggaaaacaaaaatgcctgttgtcatctaggtccgtggggacaagcccaggtgtggagcttttagccagggaccacagcctcctgtatccaacacttcccttcaccttttctatatcattcaaagggatcatgcccttcccatcccagcacttcactttcatgtcatttgccccctctgaagaggtacatctaactgccattagaatatggatgatgaccagtcttagctgcttcctgctgaaagggggcattgttttgggggaaaacggcagtcagattcctcccaggggtctctataataaaagatcgaggtggctactttcaggaggtcctctaatgtactatctggtcccaagtcccatttctgcaacctcctcctgatgtcaggagctgcctgagtaataattttatcctttaggattatctgtccctcgattgaattaggagatagagaggtgtgatttaccaaggcctctcttagcctctccaggaaggcagtgggattttcatcaaatccctggttaattatggacaacttagtataattgagaggcttggtcttagacctacgtaagccctctattatgcacacctgaaagtgtctcctcttccagtcttccatctcattattgggatcccatttagggtccttcactggtgctacttctcttccagttggataatattcgctcccttccctgatgctataggtgatgcaaagctcatccccaaatctctctgctgctggcagagcagcctgcttctcagtgtctatcaggttctgactcaaaagtaacataacgtctctccaggagagttcaaatgttagggtgaaattctggaaagcttctatatatctatcagggtcatctgaacacttgcccagatctcccttaatttgctttaagtcttgtagggaaaagaggacttggaccttactgggcccaaattcactgggcatctgtaggaggggcaagagtgagactgggcttgtttgggatgaagatttctaggaggggccaggtgagaggctgaagctggatacggaggttggggtggacccagaggagcagggcttgagggagctggcacgtcagctgggggtgcgtctgggactcgtgtctttaattccctgggcttgaccctggcagccttccccgagacagcaaacaggagggctggaacaatcctacatgtcagcaaaggtctggattgctttgcaaggtatagaaagcctgcacatttggggcctcagaccatgtgtcctcacatccagagaaaagttctaattgcaggatggtattgaaatgaatggtcccttcctgaagccaagccagtccttcctgtaaaccataatttggccaaacctatgtgcggagggctatgagatgcttttcctctggattctgagggtcaaaacagtcccaatggttcaggatacactcaaggggagtacaagctgggggtggtgaggagaactggctgcccattctgaaagacagggaatagaggtgttcctcatttcccttccttcttttggcaaaaagctcagggtgtgatggggagggaaagcaagcatcttcacttcactttccacctcttacccctgcgccctggcaaccttggcaggtgccggccacaggtacaaatgcggtatgtacccatgaagcagggagaacctggagattaggaattaactgccctcacctatgtttccttttctccctgctgttgaaaaactttgagttccctgggcctttttatcccatgaggcatggcctccttctgtgggatggggttcagtcagcaggaattggtcctgtccatttacattgtgcctgttgcctggctttgaattcctcagacctgctttctctttctagggcctcagcctgaagcttggaattgagtttgggactgaaaaagcatttcagaggctgtttatatccatttagtgcctcaaataagccctgctgaatttgcaattatcagccagcaggggtcactcctctgttaacttccctattagaaacagagcggtggggattctcacttagaaaagaaaaaaagagaaaaacagttaaagaggcaaaaagtggggaatgctgggggaagaaccccttgcttagtgcaagtgggcccctctaatccttataactttcccatccttcccccagttcagaccaggttgaattccttggccatggaaggaaaggttccattgatgcagtgggtgagaagcactctgtagggtcctggctaccatcggttttctcacacccccctcatcccaggcagtggagggagacacttctgcgacattgctccccctgccccttcatggctattgggtgtggcctttgcctgctgcaggcatgcctaggtgctggagctgggagggaaaagggtaaggagaggtgccctggaagccgctcatgcctggggctgtcaaggtggaggcatacatggcacctctaggaaaaattggtctgatttgcacctttggcggctgagccaaatgctcattttacttagtaacattgcctcagcctgtagcaaaactcttaacattataaaggaagagataagatccatttcaaataatgtgtgagagagaaaagagatgaaaggaaaacagagtcttttacctgcaggaaagggagagaagtggcagagttttggaagaaaggcaggcccaacagtttcccattcactcacactcaccttccgagatcccagacgagccaccagttgaaatgggaaaagtttccttgtccccctcacaggaggtggagtgggggtgtggcttgcttctttagtactccgctgctcaaacctctagggaagcatacagactggcaagttgtggggctacaaccccatggcagcatctaggggtagatgtttacagctgctgaagccccagtggacatgtggtaccatgtgctcttttagttttgccatctataggtggctttgtggtaaccagctcaattagacccattccttaacccaaagacagagggctttctgtatcccgcggttgttacctaggtgtaccagaaaaatcaaatcacacgtggtcttggagaatgagtgcaaggttttattgagtggaagtagctctcagcagatgggggagccaaaagggagaatagttttcccctgaagtcgggttattcagcggcccaggctctcctctggctgccccagccaaactctatgtcaatccattggtcggtggcctgccagagtgctggtgcctgttggtggattcctctcagcgtcgagagtttttccctctcaggaaagggagagaagtggcagccacccatgtgttcttgcactgatgtgctcctctcgacgtccaacctcctgtgtgtctgcctgctagggtcccagagtttttttaggcacaggatagggcatggtgggccagggtgatcttgggaaatgcaacatttggtcaggaaaacaaaaatgcctgtcctcatctaggtccaggggcacaagcccaggtttggagccctagccagggaccccggcctcctctacccatcactttccttcaccttttctgtatcattcaaagggaccatgcccttcccttcccagcacttctcttctgtatcaataggtgatgtttttaaaatttcccaactctagtgcaggcatggtactagacatatacatagaaataaaaccacacttattcttctggctggcaagacatagtatttttgccaaattatgtgttgttttgaagcattttatgtacccctggtcatataaaaataaagctattttgttcagtacaaacagcagcattttctggattagaaagttaatcatcttaaaagatcatcacggatttttccattgcactcatcactaattgctttggcaaaaaatttcttatctcacgcatgacaaaatcagccgcagtatctcctagtaatttaatggtgatgatctttataaaggaaataagcacatcaagggaaaacataattttttttaaaaaaagagtaataaaactttttaaaagtcttttttaaaagactgcttttctaaaatagtaaaataaaactccaccaataaaaccaccaacaaaacagaaaagaaaaaataatgatatgatcggagctatttgatgaaagatggtaaattaaatttaaaatgattagaagagaaaaagcaatacctgtctcccgtaggtctcagtccaggttctgctatgcctttctcctggtgagccacctatttaagagtcgcttaaagcatatgttaatccaacaacagcagattaaaaaccaatgcaatctgaactatttgatctaaaaacataaataaaatttaaaacaaataaaagagaaaaagcagtacctgtgtcctgtaggtctcagtccaagatctgctctgactcccttgtggtgagttagccctttagaagtcacttggggtggggcatatgttaattccactaacattggttctggccaatgagtcaggaaggtggtaaatggcaccttttcttcttgctgatttctttcagttcctttggagtctggacattagtcctttgtcagatgcctagtttgtgactactgtttcctatactgtgggttgtgtgtttaccctgctgatatttcttctgccttgcagaagattttcggtttcattaggtcctattgatcttattctatttttatatttttgcgtttgcttttggggcattagtcatgactacttggcctaagccaatgtctagaaaagctttttggatgctatcttgtagcatttttagactttcaggtcttagatggaagtttttatatgctttgttaaagatcaggtgactgaaagtaccgggctttgtttctcggttctctattctgttccattgctctatgtgcctatttttatacttcctgcaccatttattgaataaagtgtcctttccccaattagtgtttttgcatactttgttgaagattagttgtctgtaagcatttggctttatttctgggttctctattctgttccattgctctatgtgcctatttttatacttcctgcaccatttattgaataaagtatcctttccccaattaatgtttttgtgtactttgttgaagattagttgtctgtaagcatttggctttatttctgggttctctattctgttctattgctctatgtgcatattttataccagtatcatgctattttggtgattgtagccttgtagtataatttaaagcctgccttcagatttgttctttttgcaaagtattgctttggatatgcggtcacgtttttggttttgtataaattttaggattcttttttctagttctgggaaggagaatgatgatattttgatgagaattctactgctctgtagatggctttggagagtatggtcactttcacaatattgattctacctattcataagcttataatgtgttcccatttgtttgtgtcaactgtgatttctttcagcactattttgtagttttccttgtaggaaacttacattaacctacttggttaagtatatttctaagtattttacttattaaaaattctcagggaaatgcaaagtaaaactgaggtgggaaattaaagaaaaataaaattaaaaagaaagggaaataagctttcttgtattaagctaacttgtcccagaggcagcaacaggcacagcccagacccaggaaaagtcttgataatattatttattgtattctggagactcttccagcactccttcaatgtagggagaagaaaaacaaattttcctttgttttatggtatgagtttatagattcttgttctctttaactagtaacttcaagtattctgttttatctaagaagtatggcaaaggtcatgagaagcctgagcaggcctgaactacagctctctaggcaccatagtgaagataaaccaatgcaagcctctttagagcaaaacctagataatagacatctgggttgcatagcaacagttatgtgcaatcctgagttatgaacctgttacaatttgattaactgtctttttcctgcctctgtatccctgctttcacaccactgtaagcttgcttcaagctggcccacccccttttgtgaagtgtgtataaaagtcaagtgctgtctttgttccaggccctgtctttggacgtgagtctgctgggcctgagagcactcaataaaagattctcctgttttaacccaaagcctctctctcatcctcctaaatcccacaacaaaaccacaatgagatgctatcttaatcttgctagaagcccataatttaaaagtcagaaaacaatagatgttggcatagatgtggtcaaaagggagcactttgacactgctagtgggaatttaaactagtccgaccactatggtaaacagtatggggattccttaaagaactaaaagtagaccattcattccagcaatcccattactggctatctacccaaaggaaaagaagttattccataaaaaagacacaagaatatggatgtttatagcagccgattcgcaattgcagtgatatgggaccaacttaagtgcccatcaacgaacgagtggataaagcaaatgtggtacaccatggaataatacttgataataaaaaggaacaaaataatgtcctttgcaacaagttggatggaactggaagccattattctaagtgaagtaactgaggaatggcaaatcaaatattgaatgttttcacttttaaatgagagttaagctatgagaatgcaaaggcataagaatgatataatggacttggggactcagggggaaaggttgggagggggatgaggaataaatgatgacatattgggtatattatacactgctcaggagacagatgcctcaaaatctcagaaattaccactaaggaacttttatccacataaccaaaaaccacatatattccacacactattgaaagaaacataaacattattttaaaaaataaagccacttttaaaattagcaaaataaaataaatatgtcttcagagtttagatattggatccaaattagacagatcaaatactgcctttactaaatattttcatgtcattaacaacttctaaaacctttcaaacagttttttgacatgtcttggaaccatccatttctagctaaggcctgggcacctgtgaaatagggccatgcccccccttatactgggaagagtaagatatttcaagactaagatgttttctacagctccatctttttctttaagctctacatcaaggacataattaaaattggttgtctcctaagtggtttactaaaaatgcatacttaagagttaccattataattaatatttgtatctaaagctacttaaaaattttcacacacaaatctgactgaacaagtaaaatatattttaagtcaaagtttataaaaggacatgagaacatagcttttatgaaaaaattagttttgtcaagtttagaggttttcaaatattttaaattcaggaaataaaataacaaaaagacaaaagaaaatggttgaacaacttagaaaaggtttgttaaaattcatcttataaaacaatctacatgtaaaaagtgggctaaaatttgaaagagattatttaggttttccataaattaatccagaaggggtaggaagtcttaagaatgaggaaggacaggaggaaggggaggtcatcctgacactgcagaggcagaagtgcagctgaaggtatgaaggctaagaggggaggggagtttgagtgctgctgcctggctgtcagagcagaggagggtcctgggcaccagacttgaggaagggatgaaaatgctgggcagacctgtagtgggcccttgagatggcagatagtggtttccagagagagggccattgttttccagtgcccagcactgagcagagagagttttgggcagtgtaaaaaaaaaaagagaacttacctctttctcgttttagaaaaagaacagtctaagaatatcagcagggaaactctcagtgcttcaaggggttaaacgcccttttggctttcttgtgttggtttcatcatagaggaggagaaacttcttggaagtgttcctaaaaacacaacacgtctgcttctcctttcaaaaaaggaagtgctaaaacacgaacactctagatccaaatattaatacggatgtctaaatgcttccgttttccaaggggcagaaagctaaaggttgtaacctattcatttcagtcaaagttggtgaaagggaagcaaaggaactgggtggggcttggaaggatgacgaagctcaagctcattggccagcaacctctctcctgggggcgggaggggtgagcatacgtcattgctttggcttctataaaatgaggaggactcaccgagtgtgaagagtccttctggtgattgcagctgagagcacactcacgacgttctgcaaggattctctgattatgattctgaagggaaaagcgatggaatggacagcagagattgtaattttctttatcttgaattacggaagaaagtatctaggacagaaatccacgacaagtccttggaaccagcagatctcttcgttcacggagacgttgacgtattctctattgaagaagattcttaccttcttactggacaaggttttgtcagttctgcgtgactggattgtccgggagactctgaggaaactgatgtcacatgtttttccaaagaagatgtttctggaaccaacaactgtgattgtggtttgaggacttctgagagttccagtacaggaaataagcagaacatcagctggaggctaaacggatccagacttcactcttcacttcccttcctattcagtctattgtgcctgctgactgagaagcttggctggtatgtgagcaaataaacggaactattcagaaggagatgttgacatattctgtattgaagaagatccttatcttctcacctgacaaggttttgtcagttctgtgtgactggattgtccggaagactctgaggaaactgatgtcacatgtttttccaaagaagatgtttctggaaccaacaactgtgattgtggtttgaggacgcctgggagttccggtatgcgaaataagcagaacatcagctggcggctgaagggatgcagcctccactcttcacttcccttgccattccatctattgtgtctgcctgactgagaagcttggctggtatgtgaggaaataaacggaattataaacaaggagattgtttctcatctacttcattctgttgtggcttttctattttggggttcagggtgtgtgacaaggaccaaggagatgaaaggtttcatgatggagaaagcccaggcaatcagattgaagagctatccacagggaatcttggctgctgaggggctgcaccctgcaacggactgaccatatgacagaaaagggttttaaaggctcaacttctggactgagaacccagagtaatttgggaacctcctctgtgaggagatatgaaagctgggaatcatgacatccctaggaatggaaggcacatttcctgatggaaggggtgctttggaaaacaggagcagagtagacacagcagccttgtggatacgggtgggcagcatgcatgggtgatgtgaacgtggagtgtttgtgatcgaaactcaaaatgtctgacaaagtgaaaacctagaaaccacaatgaggaggaagagtttgtgagggcaatcactctccccatgtgtgaaaatcgggggctcttaaaatctcatctggagaggtgcagtctaccaaactctgggactttagcctccccttttaaaaaaccgtgcatcaataccaacgtccgaaaccacagaaataacacctggcttgcatggagacaaggacaaaaagccgtcatgatgagttgttctgctcacttgctgcctctgttcagtgcacaggatattgtccacccactagcaggctactgcaagagaagtgtgcaatatgttccctatgtgccatatatgtgccatatggcccatatgacaactgagtcagaaaatatctgatgccctcagagttacactccacctggagcttgcccccagccatccaggacctaggctccctaccctgtccaattttctggtgttttgggggcttcattctctaaggtgtgcccactctttactcaaaccaaaacacccacatattcctgcccatgaacaaccaatcaaccacttctcagttccacatcctgctgttgggtctctagtggtgacactgtaactcccaggtcatagtggtgacactataacacctagctaaattgatgccttgtctctaggaggccatgggctcctgcaggtctcatctgactctctgtagccttccctgacaatgctcacaatacccaagccagagccacattgacagcaagctgctctcatcttacctttgccagacctggccactggaaaaggctgaccctcatcctgcaatgcctatacctccaacctttgtctcaagctggtgtcctggagggacttctaagcagaaaacagattcagactcccatcctctcctgaatggcctcatatccaattctcagaccctcagccttcattgtaaggacacttcatccatgcccttgagtattctgtctgcactgtgtattctgcaatagattctcctccctctgcgaccctcaactccttccgcagactttttgttttcttgatcatctaccatagtcttccactgggacactgccaagcccattctggagagtgagttgtgcaagtacactgccccccatctacctttcgggaggtgtatacacccttctttctcccaggtctggaggctttctattttcatcctgaggcatctccacctgctcttggattcttcaaattgacaaccaccagttaacaagaactatgtgtcaccaaatagccaaacaatggcaattacaaaaataaaattaatagctgtaacccccattagcaaggatacacaaatcaaatcagggatagtgggtgaggaagtctgcctaacattcaaggaaggattctgaagtgatacaaaatcattgcctttgctatctttagaatggacactttcagccaggcacagttgctcagcctgtaatcccagcactctgagagccccagttgggtggatcacttgaggccagcagcttgagaccaccctgggcaatgtgcagaaaccccaactctactaaaaatacaaaaatagccagttattgtggcacatgcctgtaatcccaactccttgggaggctgaggcacaagaatcacttgaatctgggagccagagtttgtaatgagcgaagatcatgccactgcactctagcctaggcattagagtgataatctgtctgtggaaaataaaaacattcctcttcaaagttttcttctttaaatcataaatgttggaattaatatatcctctttgaaactcactttcttcaagcttctttatttgatggtagtaaatctttgttaagctttatgaggcaagagtaatggaagaagcatattatatatatttatactctaacctcagtgcttgttctagcaagctcaggcatgcgtgaatgtgcccaggcatgttccagcccataccttatatcctttccttattgggaaatgctgttactcctataagcattcttgtaagcaacttcctctttttctttgtctccactatctttacctattgaggacagttttaggttcttagccagttggatgtagcatagactgtgaggtccaaccccagccaatggagatagcacacagcagtagcgacctcatgcttaacagataaatattcctgtctccctttgtttggggtgctctcagctgatgagcaacaccctttctaaagaaattaaagttgtcttgctgagaaaacttttggtctaaatgctgattcttccttgcagcactgaagaagaagcaattatttccaacactttctcatacacaaaaaaagaagaaggtggaagaaaactttcttgtgcaccctatccctcactcagaaagacaacagaaggctcctagtggcaagccctagaggattcatttcttttgggaaccctcttggctgggatactaggactcaggtcaaactcagcattttcagtgtgtgggaagtgtgcttgggtttcactgttacttccaataatgtgatttggtccttggggttcaccaaattttggtatggagtggtgaaccctgttaagtttaagtgtctataaaattaacaaagcaaaataaccattctgccccatggttcagagaccaaatattgtgtaggaaatgctttagcgagagaaacagagaagaataaaaaatgtcctcaagcgctgcattatttcttgttatcgtccagatcttagaggaaaggctttcattttccctcattcagtatgatattagctgtgcatctgtcatttatggcttttattatgttggggtatgttccctgtgtatgtagttttttcagggtttttgttatgaagtgatgttgaactttatcaaacgtttttcagtttcagttgaaacgatcatatgctttttgtccttcattctcttgatatgatgcatcatgttgatgatttccatatggtgcactgtccttgcatcctgggcatgaattccacttgatcatgacaaatgaatttttaatgcattcttgaattccgtttgctggtattttgttgaggatttttgcatcaatattcatcagagatattggcctgcagtttctttttttttcttttttctttgttttgttgtttgtttgtttgtttgttttgatgtgtctatgtctggttttggtatctgggtagtagtgttccatccccttttattttttagaataatttgaataagactggtgttggttctttaaatatttggtagaattccgaagtgaagtcattgggccccgggcttttctttagtggaaggctgtttattatggcttcaatctcgttacttattattggtctattcatgttttgaatttgttccttatttaatcttggtaggctgtgtgtatctaggaatttgtccatttcttttagattttcaaatttattggcacataattgcccattgtagcctctaatcgtcatttgagttcctgcagtaccaattataatgtctccttcttcatttttgattgtatttatttggatcctgcccctttttttcttacttaggctgcctaataatttcttaattttgttgaactttttcttttgtttgtctcgctctgccaccaggctggagtgtagtggtgtgatcttggctcactggaacctccgtctcccaggttcaagcaattctcctgcctcaccctcccaaatagctgggactacaggcaagtgccaccactcccagctaatttttgtatttttagtagacacgggttttcaccatgttggccaggatggtctcgatctcttgacttcataatccacctgcctcagcctcccaaagtgctgggattacaggcatgagccactgcgcccagcctaattttgtttaaattttcaagaaatcaacttcttctttcattgatttctgtattttttatttccattttatttatttaaactctaagctttattctatcttcttctcattttagctttggtatgcttattgcctctctagctctttaatgtgcattgttagattgtttatttgaagttcttcctctctacaccataagacgtaagcatgtcctcattatgtcataagatgtaaccacttacagctataaacttccttcttagttctgcttttgctgtatctcataggctttgttatgttgtgtttccattatcaattgtgtcagaaatttttcaatatttttcttaatttcttcattgagcaactgatcatttgggagcatatttttaaacttccatgtacttacatagtttccaaaatacctcttgtgatcaatttctagttttattccactatggttcaagaagatgcttgatattatttcaattttttttcacattttaagatgtgttttgtgacctaacatatggtctactttttttttttattaaactttaagttgtggggtacatgtgtagaccgtgcagttttgttacataggtatacacgtgccatggtggtttgctgctcccattaacctgtcatctacattaggtacttctcataatgctatccctcccctaacctccaccctctgacaggacctggtgtgtgatgttcccctccctgtgtccatgtgatctatttttgagaatgatccatgtggattagaatgctgtggaaaagactttggattcctaatatccagggagggagacgatgatattactttcaatatcacacgggtgtacacactctctgtgacattgttcctaatatccagtggaagagaggatgatataacacccagggagggagaggatgatattactcttaatattgcagggtgtgtacccatgcctatgatattgttcctaatatcaggagggggagaggatgatattactcagaatatggcagggggtgtacacacactctgtgacatggttcttaatatacaggggagaatgggacaatattactctcaatatcgcagggggcgtacaaccctgtgatttgttcctaatatacaaaaggggacagtatgatattgttcctaaaatcgcagaaggtgtacaacgccctgtgatattgttcctaatatccagggcgggagaggatgatattacccccaatatcacagggggtgtgcactttccctgttacattgttcctatgatccgagtggggggaaatgacattagtcccaatatcgcaggatgtgtacactactcccccatgatattgttcctaatatcaagggggagagaggaggatattactcccaatatcgcaagggaggtacatcctccatgcaatattgttcgtaatattcaggaggagagaggaagatattactctcaatatcgcagaaagtggacacccaccctgtgatgttcttcataatatccagggaagcagacgattatatgactttcaatatcgctgggagtgtacatcccttttgggatattgtttctaatatccaggaagggagaggattatattacttccagtattgcagccagtgtacacatttcttgtgatattgttcctaatatccagaaagggaaaggatgatattactcccaatattgcaggtggtgtacacccccctctgatattgttccttacatcaaggaaaagaaagaagaatattactcccaatatcgaagagagtgtacacccctcctgtgatattgtatttaatatccatggggaaagaggatgttgttactcccaatatcgcagggggtttacacccacactgtgatattgttcctaaaatccagtgaaggagaaaataatattgctcccaatattgcagggtgtatacaggccctcccccgttatattgctcctaatatccagcggtggagaggatattactttcaatttttgcagggagtgtgtaccccctctctgatatttttctaatatcaaggatgggaaaggatgccattactcccaatatcgcaggaggtgtacatgccctgtgatattgttcctaatatccagggaggtagaggatgatattactttcaatattgcaggggctgtacaccctctatgatgttgttattaatatttaggttgggagaaaatgatatttttcctaatatcctgggaaggaaaggatgatattactgtaaatattccagggagtgtacaccttcctaatattctaatattgttcctaatatccaggggtgggagaggattatattactcccaatatcgcagtgggtgtacacccctcctgtgatgttgtttctaatatccaagcgaggagaaaatgatatcactctcaataccgcagggggtgtacaccttccccatcatatcgttcctaatattcagagggaaagaagatgatgttactttcaatatcgcaggggttgtacacaacccctgtgatatttctcctaatatccaggaagaaagaggatgatattgctcccattatagcagacggtatacgcctccctgtaacattgtttctaatatcaagactgggagaggatgatatcacttccagtatcgcaaggggtgtacacctcccccgtgatattgttactaatatccagggggaagaggataatattactttcaatattgcaggggctgtacacccccgtgatattgttgttaatatttaggttgggagaaaatgatattagtccaaatatcgcagagagtgtacacacttccgataatattgttcttaatatccatgggggagacgatgatattacacccaatatcgcagggggtgtagtctccccttgtgatattgtccctaatattcagggaagtaaacgatgatgttagtgtgaatattccagggagtgtacaccccctttgtgatattgtcctaatatccgcaggagagaagataatattactcccaatatcgcagggggtgaacacaccccctgtgatattgtttctaatatccaagcgaggagaaaataatattactcccaatgtctcaggggatatacaccttccctatgatattgtttctaatattcaggtggaaaacgggtgatattactcctaatatccaggaagaaaggggattatgttactccccttatagcagggggtatacacctcccctgtaatattgttcctaatatcaaggctgggatatacgtggggggaaggatgatattactcccaatatcacaggggttataaaaccttctgtgatattgctcctaataaccatggcggaagaagatgatattactcctaatattgcaggaggtgtacactcccccattatgttgttcctagtatgcagaaaaggagaggatgacattattgccaatatcgcagggtgtgtacaccacccatgatattgttcctaatatttagagggacagaggatgatattactcccaatatcgcagggggtgtacacgcatcccctgtgatattgttcttgaaatcgaggggaaagagaattatatttctctaaatattgcagagggtgtacaccgccccctgtgatattgttcctaatagccgggggcggggggagataattaaattactttcaatatctcagagagtgtacatcccccttgtgacattgttcctaatatccagagcaaaagagaatgatattcctcccagtatcgcaggaagtgtacatttaacctgtaatattgtttctaatatccagggggaagagaatagtaatactcccaatatcgtaggggttgtacaccttttctgtgatattgttgcaaatatttagaagagagagagaatattactcgcaatatcacagggaatgtatacttcccctgtgatattgttctaatatctagaaaaagagaggataatattactcctaatattgcagggggtgtacacccccacttgtgatattgttcctaatataaaggaaggtcgaaaaacaaacggggagcccagggggaaggaaggcaggcgaggaagaggcagcgccggggcgccggagggagcagccgggccgcggaagcgcgagcacgagaccggtcgcggtcgcagtcgcatttttgccgttgtcgcggccgccgccgccgaggcttacccggggatgtctgagcccgcgcctcgcggcccccaagctccacgctgcgcccgctgtcccggcctctaagggccgccacgtccctgcggcgcgcgcaggcagaaagcggcttcgtgccggcggagggggcccgggcgggccgggaaaggctgccccaggccccgcgcctaccccatcaccgcggccggcgccgggccgggaggatgagcggtgtggggctctgaagcatggagggggttttgtacaagtggaccaactatctcacaggttggcagcctcgttggtttgttttagataatggaatcttatcctattatgattcacaagatgatgtttgcaaagggagcaaaggaagcataaagatggcagtttgtgaaattaaaggtgacagctttggaggggaccacccttgattggatacataaattctgttcattcagcagacaacacaagaatggaattaatcattcctggagagcagcatttctacatgaaggcagtgaacgcagctgaaagacagaggtggctggtcgctctggggagctccaaagcatgtttgactgatacaaggactaaaaacgaaaaagaaagaagtgaaaccagtgaatcgctgaaaaccaaaatgtctgaacttcgcctctactgtgacctcttaatgcagcaagttcatacgatacaggaatttgttcaccacgatgagaatcattcatctcctagtgcagagaacatcaatgaagcctcttctctgcttagtgccacgtgtaacacgttcatcacaacgcttgaggaatgtgtgaagatagccaatgccaggtttaaacctgagatgtttcaacggcaccatccggatcccttagtttctcctgtgtcaccttctcctgttcaaatgaggaagcgttctgtcagccaccctggttcttgcaccagggaggagtagccactgtataaaagaaccagtatctgcacttcaccgactctcccagcgacgccgaagaacctactcagatacagattcttgtagtgatattcctcttgaagacccagatagacctgttcactgttcaaaaaatacacttaatggagatttggcatcagcaaccattcctgaagaaagcagacttatggccaaaaaacaatctgaatcagaagatactcttccatccttctcttcctgaagaaactgtagtgtccaactttctctaagtattgctatgcaaaagctgctgtaattgaactattgttatagggagtagttttttcccttaggactctgcactttatagaatattgtaaaacagacaaacaagaaaacaaaccacatacttttgaagcgtgttttatctttatatagtttgtttgcaagagtattttcctaataacttcacagtatgaatgtgcatcttttttttctttttttaacaaatgatggtgtaacattttgacatccataaggacaaatgtagatatttttctaaaaaaccgtgaggggactgacagcttggtcagggtgtattgtagcttataaacatgaaatcttacaaggtttcagtttgacagaagtgtgatatatgtaacttgtgccatggaccaaatggtcactttaccacagctaaaaatgagttatgatagcagcttgatggtgattgcattgtattcctttaatcaaaaaggaaacgcaatattctaagtatctttagcccaaataccatgacatattgagcatctttaaataaccagactgtattgtccttcatatgtgaagttgacactactgatttgtcaataccaaattttgggttaaagtgtttaatttttatttatttattttcttgttgcctcaaaagatgattgcattctaacttttgtgacctaccaaatttaagatgtgtatacattgttctttacgttgttctagaaaagagattttaatgctgtagtgacttagctcacttacatcagagaaataaacaactttcaatggaaaaaaatatatataaaggaaggaagaggatgatattacttctcatatagaaggggttgtacaccccccttgtgatattgttcctaatattcagggagggagaggattatattactcccaatatagcagggagtgtacacccccccccccgtgataatgttcctaatattcagggaagcagaggatgatattactttcaatatcacagggggtgtgctgtccccctgttatattgttcttaatattcaggggggagaggatattattatgcccgatatcacaggagaagtacaccccacaagtgatattgttcctaatatccaggggtaaagaggatgatatcgcaggtggtgtacacccctccccgtgatattgtttctaatataaagaaggagagagcatgatattactcccaatatcgctggaggtctacaccccccttgtgatactgttcctaatatccaggaagggaaacaatgatattgctgtgaatattccagggggtgtacacccctttgtaatattgttcctcatatccagggggtagagaggatgatattactcccaatatcgcagggggtgcacggccccactgtgatattgtttttcatatccaggaggggagaggatgacattactctcaatatggcagggggcgaacaccccctgtgatattgtgctagttaggttgggagaaaatgatattactcccaatatcgcagggggtgtacaccgctcctgtgatattgttcctaatatccatgacgggagaggatattactcccaatatcgcagggggtgtacctctcccctgtgggattgttcacagtatccaaaagggaagaggatgatgttactcccaatatcacagggagtgtacaccaccattgtgatattgttcctaatagccagggaagaaaacgatgatattattgtgaatattacagggggtgtacacaccccctgtgatatggtttttaatatacaggttggaaaaggatgatattactcccaatatcacaaaaggtgtacacacccccccatgatattgttcttaatacttcggtggggagaaaatgatattagtctccatatcacaggggtgtgaactcctccggtgatattgtttttaatatcaagaggggaggagatgatattgctttcaatatcgctgggggtgtacatccctcctgtgatattgttccttatatccaggcgaggggaaaataatattactcccaatagtacacaccccatgtggtattgttcctaatactcagggggaaagaagataatattactttcaatatcacagggtttgtacacctttcctgtggtatagttttcaatatccagggggaaggtacatgatattactcccattgcagcaaggggtgtacacacctcctgtgatattgttcctaatatccagaagtggtgaggatgatattactcccagggggtgtacaccccacctatgatattgtttctaatatccaggggaaaagagtgtgatattatgcccaatatcgcagagggtgtacacttatcctgggatattgtttctagtatttggggagggaggagaggatgctattattctcaatatcgcagaaattgtacacccccgctgtgatattcttcataataatcagggaaaaagaggatgatattactaccaatattgcagggggttacacttcccctttggtagtgttcctaatatccaggaagaaagaggatgatattaatcccattttccaggaagtgtacacccaccgtgtcatgttgttcctaatatccagcagggaagaggatgatattactcccaatatcggagagggtgtacacttcccctgttatattgtttctaatacccagggggaagaaggatgacattactgccaatatcacagggtgtgtaccccaccctgctattgttcctaatattcaaaaggaaagatgaaaatattactcccaatatctcagggtgtgtacacctctcctgtgatatcgttcctaatatccacaggaagagagaatattactctcaatattgcaggggggtgtacacccccctgtgatattgttccaaatattcgggcggggagaggatgatattagtcccaatatcgcagggggtgtgcaccaacctgtgatattgttcctaatatccatgcgggggaggacgatatcactctcaatgtcgcaggaagtgtacacctctcttgttatatttttcttaatatccaggagggaaaagatgatattactgccaatatcgcagggtgtgtccaccccccttttatattgttcctaatatccaatggaaaagaggatgacattgctctccatatcccagaaggtgtacaacgcccctgtaatattgttcctaatattttgggggaagagaggatgatataacttataatatcacaggaggtgtacaccacccctatgtattgttcctaatatcctttaagggagaggatgatattactcccaatatctcaggtggtgcctattccccctgtgatattgtttttaatatccaggggaagagagtatgatattacgcccaatatcgcagggggcatacaccctctctgagatattgttcataatatatagagggagagaggatgatattacttccaatatcagaggtggggtacaccccccggttatattattcttgatatccaggaggggagaggttgatattactggatatatagcagggagtgttcacatcttctgtgatactgttcctaatatccagaaaagtagaggatgatattactcccaatatcgcagaacgtgtacacctccctgtgatattgatcctaacattcaaaggggagaggatgatattactcaaaacatcacagggcatgtacactcccctgtgatattgttcctagtatccagaagggagcaagataatattactttcaatatcgcagggggtgtacacccctctttggtatgtttcctaatatccagaaggaaagagggtgctattactttccatattgcaaggggtgtacacccccctgtggtatggttcataatatccagggagggaaagggtgctattattccccatatcgcgaggcatgtacaccctgctgcggtacggttcctaatatccagggggaaagaggatgctattacttcccatatcgcggggtgtgtacacccccgtgtggtatgttttgtaatctccgggaacgaagagggtgttattacccctcatatcgctggaaatgtacactcccctgtggtacggttcacaatatccaggggattgagggtgctattactccccatatcgcggggggagtgcacctccctgtggtatggttcgaaatatccagggtaagagagggtgctattattccccattttgcaggaggcgtacacccctctatggtatgttttgtaatatcccaggtaaggggtgctattgagagaagagagcaaaagaccccccccatattgttctgtattattttatactcagtacctgttttaagaagaaacaaggaagcgaaaccaaaggcaggcagcccggcgccaggcaccagatccaaaaccagacccgaaaccaggcctgggccttcctgaccttagcctgaaagttaaaattcaacccatgacctagcaactgatgttatccatagattccagacattgtatggaaggacattgtgaaatttcttgttctgttctgtttcactctgagtactggtgcatgcagcccttgtcacatacccactagattgctcaatcaatcatggccctttcatgtaaaaaccttagtgttgtgagcccttaaaaaggacagaaattgtgcactcaacaagcttggattttgatactctagtctgctgatgcttccagctgattaaaagccacttccttcactacctcggtgtctgtgggattttgtccgcggctcctcctgctacactgtgactccccttatagagaggggtgtacacccccctttggttcctaatatccagcgggggagtaggtgctattactccccatattgcggggagtgtacacccccttgtagtacggatcgtaaaatcaaggagggagagaaggtgtaattatccccatatcacagggagtgtacacccctttgtggtatagtttgtaatatccacgacgggagagaatgctattactccccatatcgtggagggtgtacaccgccctgtagtatggttcgtaatatccggaaggggagaggttgctattactccccatatggtgggaagtgtacacccccatgtgatatggttcataatatccaggggggtagaggatgatattacccacaatatcatagaaggtgcacacccttttgtgatattgtccataaaatccagaaggggagaggatgatattacttccaatatcacagggggtgtgtagccccatatgatattgtttgtaatatcaaggtagggagaggatgctattccttacaatagctcaaggggtgtaaccttcttgtgatattgtttgtaatatccagaaggggagaagataatttttttattttaaaagtaaactttaatgtcaaaaatgcaaacttgagaagggcagaaagatcaaacagaaggctgccacttcacaattggagggttgcacagtggccgggcagaggcgctcctcactccccagacggtgaggcagccgggcagaggtgctcctcacttccgagatgttgcaggagccgggcagaggtgctcctcacttcccagaacagggggctgccgggcagaggtgctcctcactgcccagacggtttgcaggcctggcagaggcactcctcacttcccaaacggagcagcggcaagccagaggcgctccacacttcccagatggtggggcagccgggcagaggcgatcctcacttctcagagggtagggcggcccagcagaggcgctcctcacttcccacatggtggggcggcaggctagaggcgatcctcacttcccagacggtggtgtggccatgcagaggtgctcctcacttcccagatggtgtggccgccgagctgaggcactcctcacttccctgacagtggggcggctgggcagaggcgctcctcacttcccagacacttggactccgggcagagactctcctcatttcccagatggtggggctgccgggcagaggcgctcctcacttcccagacggttcagaggccgggcagaggcgctctggggagaggataatgttactcccaatatcgcagggggtgcacactccctgtgatattgttccgaatatccagagggggaaaggatgatatagctcccaaaatcgtggggagtgtacacccccctgtgatcttgtttgtaataccaagaagaaaagagaatgctattatttccaatatagcagggggagtacaaccccctgtgatattgttcgtaatatctagggggagagaaaattatattagtcttaatatctcaggggacgttcatccccctgtaatattgttggtaatattcagaatggagaagatgatattgttcttaaaatacaggaaaaaatatgataatattacttccaatatcgaagggggtgtacactctcctgtgatattgttcccaatatccagaatgaaagaggatgctattactcccaatatcccagggagtgtacacccctttgccatattgttcataatatccaggggaagacaggataacattactcccaatatcaccgggggtgtccacccactagtgatatttattgttcatcatatccagaaaaggagaggatgatattactcccaatattgcaggtggtgtacggtccctgtgatattctttgaaatatctagaaaaggagaggatgatatcactccgagtatcacagggggtgtacacccccctgtgatattgttcgtaatatccaggggagaaaaggatgatataattgccaatatttcaggggatgtgcacctccctgtgatattgtttgtaatatccaggggtggagaggatgatattactcaaaataacgtaaacatcctgtgtgtacatcccctgtgatattgtttataatatccaggggggtagaagatgacattacccccaatatcacagagtgtacacacccctgggatactgttcataatatccaggcgggaaagaatgaactacttccaatatcgcaggatatgtacacccccctgtgatatatttcctaatatttatgtgggtaaggatattacccccaatatcacagaaggtgtacatcctctttgtgatattattcctaacatccaggaaaggagagaatgatattactcccagtatcgcagggggtgtacaccacccctgtgatattgttgctaatatccagggggagaggataatattactcccaaaatcacaggggacgtacactcctcctgagatattgttcctaatattcatggggaaaagaatgctactactccaaatacagcagagggtgtacaccatccccgtgatattgttttttatatccaaagggtgaaaggctgatattactcccaatatcgcagggggtgtacaggccccccatgatatcattcttaatatccagggaggcaaagaatgatgttactcccaatattgcaggctgtatacaccccccgtgatattgttcctaatatccagagtaagagaggatgacattgctcccaatattgcaggggttgcacgcacgccctgtgataatattactcccaatatcaacagtgggtgtacactcctcctgtgatattgtttgttatatctaagaaagaagaggatgatattactgtcaatatcacagaaggtgtacagccccttgtgatgttgtttctaatatccagcggtgagaggatggtattactcgcaatattgtagggggtgtccaacggccctgtgatattgtttctcatattcaaaaaggaaaagaataatataactccaaatatcgcagggtgtgtacacttccctgtgatattgatcctaatatccaggaagagagaggatgatattaatcccaatatcacagggggtgtacatcgcttctgtgatattcttcctaatatccagggggggaggggatgctattactcttaaaatcgcagggaacttacactcccactatgatatttttcctaatatccaggaagggagaaaatgatattactcctaatatcacatatcacaatgggtgtacatctccccgtgatattgtttctaatatcaaggatgggagaaaattatattactctcaatatcgcagggggtgtgcacacctcctgtgatattgttcctagtatccagcggaggagatgatattactttaaatattgtagaaggtgtacaacccccctttgatattgttcctaatatccagggggaaaggagatgatattactcctaatatcgcaggggctgtacaaccctatgtgatattgtttcttctaatatccaggggtggagaagataatattactcctaaaatcgaaggggacatacactccccctgtgatatttttcctaatatccagaaggaaagaggatgatattactcctaatattacaagaaatgtatacctgtcctgtgatattgttcctaatatccagaggggtaaatgattatattactcccaatatcgcaggggtgtacaccttccctgagatattgtttctaatatgcagtggaggagaggatggtattactcccaacatcacaggagatgtaaactccccttgtgatattcttcctaatgttcaggacgaaggagggtaatattactcactgtattgcagcagggggtgtagagccccctgtgatattgtttttaatattcaaggttggagaaaataatattccttccaatatcgcatggggtgtacacccttctttttatatagtttctaatatctggggggagaggatgatattactcccaatatcgcagggggattacacccccactgtgatattgtttttaatatccagggtgggagaggataatattactccaaatatcccagggctatacaccctccgtgtgatattgtttctaatatccagaggaagagaagatgatattactcccaatgtcacagggtgtgtacaggccttctttgatattgttcttaatatccatgagggagaggatgatattactcccaatatcgcaaagactgtacaccctttctgtgatattgcttccaatatccagggagggagaggatattacactcaggatcacagggggtgtacaccccaacctgtgatattgtttctaatatctagggaaaatgagggtgatattactatcaatatcacaggaggtgtacactcccttatgatattgttcctaatatccaggagaatgacaggataatattactcccaatatcgcgggtggtgtctccccccactccgtgatattgttcctaatacccagagggggagagaatcatattactcccaatatcgcaggggatgtacacctacatccggcggagtagaagataatattactcacaatatcgcaagaagtgttcaccttccctgttatattgttgctaatatccagggagtgagaagatgatattactttcaatactgagcgtgtacactacccctgtgatattgtttctcatatccagtagaggagaaaatcatgttactcccaatattgcaggggtgaacacctcctttgtgatatttttcctaatatcaggaaagggagagtatgatattacccttaatattgacaggggtgtacacccccctttgatattgttccaatatccaggggggcagaggataatattattcccaatatcgcagagggtgtacaccccccgtgatattgttcctaatatccagagaaataaaaaatagtattatttccaatatcacagggcgtacattttccctgtaattttgttcctaatatctggggggtggggtggcaggataatattactctcaatattggagagggtgtacacccccctgtgatattgttcctaatattcagggtgggagagaatgatgttactcccaatatctcaggagtcgtatacacccccttgtgatattttttctaatatccaggaggcagaggatgatattgctcccaatatcgcagggggtatacacccgagctgtgatattgtttctaatatgcaatatgggggaaggatgattttactttcaatatcgcagggaatgtacactttccttgtgattttgttcctaatatccaggggtggagaagatgctattactatattactcctcatatcgcaggcggtgtacaactccctgtgatatggttcagaatatccagagtgaaaaaggagggtgacattactcccaatatcgggggggtgtacacccctttgtgatgtggttggtaatatccaggggggcagatgagggtgatatcactccccatatcgtggaaggcgtccacttttttgtgatgtggttctttatatcccgaggggagaaggtgatattactccccatatcgcgaagggcatacacccccctgtgatatagctcataatattccggagagtggaggaagatactatgccctatatcgcgggtggcctacaaccccctatggtttggcttataatatccaggggggagagggtaatattgctccccatattgtggagacgtacagccccctgtgatatggtttgtaatatctttggggggcgagggtgatattactccccatatcgcggggagcatacacccccgtgatctggttcatagtatctcaaaggaagaagttgatgtgtacaacttaagggaaaaagttgaagtgaagtgtacacacgccctgtgacgtggttcataatatccaggcgggggagaggagagtgatatttactccccatatcgcgggtgttgtaaactcccctgtgatatagttcataatatccaggggagagaggagggtgatattgctcctcatatcgcgaagggtgtacaaccccctgtgatatggttcataatatccagaagggtagaggacgatgatattactccacatatcttgggaggtgtgatatggttcgtaatatccagcgatgagagaatgatattactccccatatcgcaaaaggtgtgatagggtttgtaatatcctgagggggagagggtgatattaatccctatattgcagaaggactacaccctcccatgacatggtttgtaatatcccagggggtagagtgtgatattactttccatatcacagggggtgtgatatgattcgtaatattcgaagggggagagggtgacactactctccatatcacggggtgtgtgatatggttcttaatatcccaggggttagaggttgatattaccccctttttggggggtgtgtacaccccctgtgatatggttcgtaatatcccgggggagacagggtgacattattccccatatcgaggggatcgtacaccccctgtggtgtggttcataatatccctagggggagatggtgatattactccccatatcagggggcgtgcactcttctgtggtataattagtaatatccagggggcagaggtcgatattcgtttccatatcatgaagggagtacacttccctgtgatatggttcctaatatccaggggggagagggtgatattattccccatattgcggggggacatacaacccctgtgatatggttcataataaccagaaaagaagagggtgatattaatccccgtattgcagagggcatacaccccccctgtgatatggtttgtaatatctaggggaggaaaaggtgatattactttccatattgctgggtgcagacacccctttatgatatggttcataatatccaagttggagagggtgatattacttcccatatcatgggaggtatacccttccctgtgatatggttcgtaatatccagaaggggagagattgatattactccccatattgtggggggcgtacaccttcctgtgatacggtttgtaatatctaggggatatagtgggtgatattactcaccatatcacgggggttgtaacatggtttgtaatatccaggggaggagagggtaatgttactccccatatctcggggcatgtacaccctcctgtgacatggttcgtaatatccaggtcgggagagggtgatattactcctcatattgccgggggtgtgttatggttcataatatcctggggaaggaggctgctatcactctccacatcttgggggatgtacactctcctgtgatatggttcataatatccagggtgggtgagggtaatattactccccatatcgcgggaagtgtacatacccctgtaatattgtttgtaatagaagagagggtgatattactccccacatcgcgggtggtgcccacccccctgtgatatggtttggaatatccagggggatgaggagggtgatattactccccatatctcggtgggagtacatccctctttgatcaagttcataatatccaaaaggaaacaggagagtgatattactccccatatcgccgggggtgtacacgggagggggagtacacccccggcgatatggtctgtaatatccagggaaggagaggagggtgatattactcaccatatcgcaggtggtctacatttacctgtgaaacagtttgtaatatccagggggggaaatgagaatgattttttttttttgagtctcactgtgtcacccaggttggagtgcagtggcacgatcttggctcactgcaacccccgcctcctggactcaagcaattctcctctcccagcctcctgaatagctgggactacaggcgcaccccacaacgtctggctaatttttgtatttttattagagacggggtttcaccatattggccaggctgatctcgaactcctgaccctgtgatccatccgcctcggcctccaaaagtgctgagattacagatgtgagccaccacgcatggcccaaggagaacgatattactccccatatcccagggggtgtatatccccctgtgatatggttcagaatatccggaaggaaagacagggatattacttcccatatcgcaaggggtgtgacatggttcgtaatatcccatgggggagagggtaatattactcttcgtattgtgaagggcatacactcccctgtgatacagttcataatattccggggagtagaggaagatattatgctccatatcgcgggtggcataagccccctgtggtttggttcataatatccagggaggagagggtaatattactccccatattgtggggacgtacaccctcctgtgatatggtttgtaatatcccagaggggagagagtgatattactccccatattgcagggacatacacccccctgtgatatggttcaaaatgtcttttttttttgaaggactggttctttatttcaaaaagacacttgtcaatattcattatcaaaacagttgcactattgatttctctttctcccaatcggccccaagtagaccacatcaaaggagagtacatattaagccaataagctgtaggatgtacacctaacagacctcctagaaaccttaccagaaaatggggacagggtagggaaagaaactttaaaagatcaacaaactgccagcccacggactgcaggggctgtcacagccagatggggtggccagggtgccacaaacccaaagaagcaaagtttcaaaataatataaaatttaaaaagttttgtacataagctattcaagatttctccagcactgactgatacaaagcacaatgagatggcacttgtagagacagcagcttcaaactcagaaaagggtaatgagatgagtttcacatggctaaatcagtggcaaaaacacaatcttctttctttctttctttctttcaaggaggcaagaaaagcaattaagtgctcacctcaacataaggggaacatgatccattctgtaagcagttgggagggggtagagatggaacaaaattttggtctcagaggtcttgccatcttaatttggtcacttctaatgaaaaaaataaaaaatagaaataacattatccaaaggtatcttaaagctgaaaacttgaacagcacattttttgttgttgttgtttggctaactcctcctggaaccacctttctggcttagctagtactttgtacagagcaatgaggcttcccatagtggagtctccctgggctctgtttggctctcagcaaggcaggcctataccttttcctctcctccatggagagaggaatatgcattaaggtgaaaaatcaccttccaaaagtgagaaagggattcgatcgctgcttcagggctgtggtattatatggaatgttttacaaaaggttgctacaaaacaacaaaagaggtaattacaaaatgtgtacatcacaacatactttttaaagacattatgcattgtgctcacattcccttaaatgttgtttccaaaggtgctcagcctctagcccagctggaatctccgggaagaggcggacagtttggtgaaaaagacacagggaaggagcgggcggcggaaggagggggcggcgaaaggagaaagcagccttccagttaaagatcagccctcaattaaaggtcagcttcgggcaggctggcctcaggcggagtctggttcagagggaggagcagcagcagggtgagactgaggcgttctacatctcattcaggtcaagcagagtctggtccagcatcctttgtgtacagaggtgctcccctttggtgcatttcagtttatcttccaagtcatcaattgtcttttccagcttggctaccgatctctcagcaaactcagcatgggtctccgcctcctttattttatcagtaagaatcttgatctcttcctcatatttgtcttctttttgagagtacttttcttcagcagcactcagacacttcaggttctggtccatcagtctaatctgctcatccatctctcggcaaagggattctgccagctcagctcgttcctctgtgcgttccaagtctccttcaatgatcaccaacttacgagccacctcttcatacttcctatctgcctcttctgcaatgtgcttagcttctctgagttggatttcctggagttccatcttttcttcatcttttaaggcccggttttcaataaccttcttacctctctcactctcatcagcagctttttccgcttcttccagcttttgcagggcagtagccaggtgctcctgagcacggtccagctcctcttcaaccagctggatcccacgttcaaggaggccacctcagcctcagcctgttcccgggcccacctttctccctcaacttctcgctggaggcgctcagctcgctcctctgcatcatctgcctgctgctgcagaacctggatcttgcgcttcaccgcctcgatggtggtgatcccagccatggtgcccacccagctactgctagagctccggttcctgcctcctccgatcggcgttgcagcctcctctcacccttacttccgcctcggttcaaaatatcttaagggaaggagttgatattactccccacatcacgggaagtttacatcccctggtgatatggtttgtaatatcccagggtggatagggtgatattactctccatatcgcgaaggagtactcccccctgtgatatggttcataatatccttggggggagagtgtgatattactccccatatcgcgagggccatatactcctttgtgacatggttcgaaatatcccggtgggggagggggtagagggtaatattactccccatacagcgaagagcatacgcccttctgtggcaaggttagtaatacttcagggaaaagagtgcaatattacttttcatattgcagggaacatacactcccctgtgacatggttcgtaatatcccgggggctgagagggtgatatttctccccatatcaccgggggcctacacctgggtgtgatatggctcataatatacagggagggagagggtgatattactccacataccgagtgaggggttacacaccctcgtgacatgttcgaaataccccaaggaggagacaatgatattactttccctgtcgcgggggctacaccctcccagtgatatggttcacaatatcccggggtggagagggtgatattactccctatatcaccggggggtgtacacttccctgggaaatggtttacagtatccccggggggagagggtactattactccccatatcacgttacatatcagggtacacccccacgtgatatggtttgtaacatcccaggaggaagaaaatgatattactccccatatcgcggtggcatacacccctccccgttaaatggttcataatatcttggggtggagagggtgatattactccccatatcacgtggggcatacaccccactatgatatggttcataatatcccggaggggagagggagatattactctccatgtcgcggggggcatatacacccctgtgatatggtttgtgatatcccgggggcggagagggagatattactctccatatcgtggggtcgtacacttttctgtgatatgattcgtaatatccagacggggagagggtgatattacttcccatattgcgggggcgtacacccctctgtgatatggttcataatatcccgaagaaaagagggtgatattactcctcatatcgcggggaacacacaccaccctgtgatatggtttgtaatattcagcgggggagagagtaatattactccctgtatctcggatggcgtacactcccctgtgatatggttcataatatccagaagaaaagagggtgatattactccccatattccagggaatgtacaccaccctttgaatatggttcgtaatatccaggaggggagagggtaatattgctcccaatatcgaaggaggtgttatacggttagtaatatccagagaaggagagggtgacattactccccacatcgtggtgggtgtgcacccacctgtgatatggttcataatattcaggttaagagaggtgatattgctttccatatcgccaagggtgtacactcccgtgaaatacagttcgtaatatccaaaaggggagagggtgatattactcccatatcgtggggggtgtacacccctctgtgatatggttcataatatccagggtggaataaggtggtattactccctgtatctcggggcatgtacatcgcctgtgatatgattcataatatccagaagaagagagggtgatattaatctccatattgctgggggtgtacaaccccctgttgtatggtttgttacactgagttggggagagggttacattactctcaatatcgagtggggcatacacacttatgtgatatggttcataatatcccagggaggagagggtgatattactccccatatcgcgggaggcatacaccccaatgtgatatggtttgtaatatctacatttttttttttgagacgaagtctcgctcttgtcccccaggctggagtatgatggccggatctcggctcactgcaacctcagcctcccgggttcaagcgattctcctgccttggtcccccaagaagttgggattacaggcgcacaccaccacgcccggctactttttgtatttttagtagagaaggggtttcaccatgttggccaggctggtctagaactcctgacctcagatgatccacctgcctcggcctcccaaagtgctgggattacaggcgtgagccactgcacctggcctggtttgtaatatctatgaagggggaaggtgatattactttccatatcacgggaggcgtacaccacgatgtgatatggtttgtaatatccagggggtatactgggtgatattactccccatatcgcggggagtgtatacccttttgtgatatggttcctaatattaagctgaggagaaggtaatattactccccatatcgcaggggtttttatatggttcataatattcaggaagagagagggtgacattactctccatatcacggggtgtgtactcccccatgtgatatggtttgtaatatccagggaaggagaggttaatattactccccatatcgcagggggtgtacacctctctgtggtttgtaatatccaaagggaagaggatgatattatcttcaatatcttggggggatacagtccccagtgatattgttcataatatccagagggggaggggatgatattactcccaatattgcaggtggtgtacaaccccctgtgatattctttataatatagagggggatgatgatattactcccaatatagtaaacaacctgtgtgtacaccccctgtgatattgtttataatatccaagggtggaaaggatgatattactcctcatatcgcagggggtgtatacccctctgtgacattgttcctaatattcaggggaggagaagatgatactactcctcatatcacaggggatgtacacccccctgtgatacttttggtaatatccaggggaggagaaaattatattattccccatgtcacagagggtgtacaccccgctgtgatagtgttcataatatccaggtgaaaagaggatgatattactccgaatatctcaggaagtgtacacccttctgtgatattgttcataatatccaaaggtggagaggaggatactactccccatatcgcagtgggtgtacacccccctgtgatatggttcataatatccaatgtaggagaggatgatattactttccatatcgcggagagtgtacatccccctgttatattgtttgtaatattcagggagaaagaggatactactactccccatatcacacggggtgtatattcccctgtgatatggttcctgatatccaagagatattataatcctctcttggattatgctacctctcatatcgcatggggtgtacacacactttgtgatatcgtttgtcatatccaaggagggagaggattatattaatcccaagatcacggggggtgtacaccctcctgtgatattgtttgtaatattaaggggggagaggataatattactcccaatataattaacaccctgtgtgtactcctccttgtaatattgttcataatatccaatgggggagacgatgatattactttcaatatcgcagaggatgtacatccctttgtaacaatgtttgtaatataaaaggcaagagaggatgatactacttccaaaattgcaggacatgtacaccccccggtgatattgttcctaatatccagtggggaagaggatgatagtagtcccaatatcgcaaagggtgtacacaccccctgggatattgttcctaatataaaaggaggagaggatgctattattcccaatatcacagaaggtgtaaaatcccctgtgatattgttcgtaatattcaggaggggagaggattatattactcccaatatcacagggtgtgtacacagggaggggcaagggccagaagcgggcgggaatccccatgtttgggcggacccagtttctaatggccagcatttgccaatcaaagcttaccagagaactctaaaagccagggctttcctgctagacaagactcatttctggaactgctttaaaaagaaacaaaacttcccaaggaccccttttcctctctgtctgcctaaaataatgttttaaaaactcctaaagcagctgaattcagcccccttcctgggggaatgtatagacggaactcccacctttcccggcatcccaaggccagagtatgtgaaactcctgggtctctatgtgtgtctgagcggctgctctgccaacactccacacagccctgtgtcctggacccaaggcccttatgacctgagctcaagaggggatctcctgatccatgggttgcaaagatccatgggagaagcatggtttctggggcggggtcacacgctcagtcactgtttccctcggatgccggagatggttcctttggctctctgccaatacagggtgaatcatcatccatccctcttttctttgttctcccgggtcaagttgtttgcctagtcagtcccaatgtgagaacctgaatatttcagttgacgcgctgacttcaaaatccccgggcttcgggaggcggagcttgcagtgagccgagatcccgccactgcactccagcctgggcgacagagcgagactccgtctcaaaaaaaaaaaaaaaaaaaaaaaaaaaaaagtccccgggcttttcttttcactcagtggaaggcagctgcttctaattggccatcttggcccgcccccaccacgtgaccttctgtaaaatgcctccactctccaggaacgctctcattatataactttgcctgaaaccaacagcacgctcattgcacatatcatgggctcatttatttcacttataaagaacctggccaaggaagagatagtgcctaaagtggccagtattctgaccgatatgttagaaaaatggtgtgccgaccaattcatgacatgtgtcccaaaactagcaacggaaattgtattcgccgtgttgaggtctctaatccagatgatgctcatctatgtactggaaaaggcagagtcctttcctgacaagctgctgaaactcttcagaaacatctcatatttcctgaagaagatgatgtctggacaagcagcacaggtcgttcagatttaactttctattcatatatccagcacgatattcgcacaattgtcacgaaaccttaccagttgatgagtcctgcacatttcctttaatttcaggaggaagagggtaatccggatgagttttctgacctactctgctgctgtgattaaacaaccaccaggaaattttgacgacactgttctcctgagctcctccctttcctccgggaacaaaacaattgaatttacaaaaataaagtgttatttgactggagtgaggtctcatgtctgcttatgcggtggctcgctgctcagaacagggtgagtctctgggttgtgtgctgaggaggggaggctctcaatctggagaaaacccactgcaggggacacctccatggggtctgagggactgaggatgaggagccggactgggtctagggaaggaggaggtttcagagggtgaaattctggcactaaagcctgggggtgtttgggaacttcctccttccgaagaagtttcagggagggataaagacaaaccctgggctccttgaggggcccttactaatttgagaggactctatcgggaaggagagtgacaatggcctccttgaggactgaggcccctgaataaatgaggcccagatacagtccatgggggatgagaccttcaagggtcacattttggttgggacagaggaaaagtgcagctctgcagccgcagaggaaaacccggcagtgtgaaagcgaccttggaggggccctgtgcgctctgaatgcgtctgagcccccatcccctgtccccgcctctctttctggattcttccagctcggctgtctccgccatcttctgagcgctccaccctgacttattcaagtttcccttctgccttccaagtactccaaaatctttcagatctgtgtccctacccctgtttttagcatgtgttggggctccaggtccctgaaggtttctggcctgaaatccacctccccagcggagtggactgcgttctagagactccacactccgcgaggttcccaggcccctgagggacaaccgagtggcctgcgcacttcagggctccacactcggcaaggtctttcaagcccttggggtccccttcttagttttttccacctttctgggctgcagtcactccataaatgctgggatctgatccccacccccactctcgtttcctcaattctgcgggctacacgctctggcaaggtcctccgggccctggatcccctccctctccctatgcccacgctcctagtcagcccttctggggtccactattttcaggaactaaccgttctcatggagccttgctaaccggaaagctgtgtggaagaaaggctttgaggatagaggtggagatttggctcttccatagtgccactcacccaccccaccatgctgccactgccagacccggacccctgtttcagaacaagtgaccagattcgctcctggacagccctggacactggccttttctctgaaaactactcaccctttctctagtccccacttcatgccagcctcataccctcttccttcccccacgctggcttccgggatcctcctctgctcagacaacctcttctgtgtcccacccccgtttttagaatgctttggggcaccaggttgggggaaggtttctggcctgatatccatctctttccaaactcccttcttcccttgaaaggcttcttgccttcagccccacttctggctccgaggtttcaggacaccctcctcttcatcctcattcttttgaccaccagctttttaggaattcgaacgtccctctcatcttcgtgaatcctgtccaggcatttgttgaccccttcatctgatacccctgacctcacattgccaaaagtctacccctacccagtacactggaattagacaaaatcccaggagttttacctcaactctgagtgtgcccacaggagctctccctgaagccacgtccttttaagcagggtctagggttcctcccttgtcttaatgaactctttgtcacacggaggacgttatggagcccttatgatctttcactgcctttctgcccagcgttttgtctttccatggacatttataatattttccatggacattttgttctctcaatgtccacccctaatttccaacatcccaaagattctcatgtgtttcctgaaagccatttacaggaatggctgtgcccagacccccttccccaggatcctccttcacacctggtaggtgcctctcctagagagatttgcactcagttgtcgtgcagtcacatggcccagatggttgttaatcacccccttcctggcaacagctagcagccagggaatcactggcacagaaacctcagggtgaccaagatgaggccacctctgtgctgaaggctgtgctccagagcctgcttgggatcaggcttaagcaggtcttcagccagacctgatgttacctggtttccttgagctgccctgcctgagctatcgggagcactccctcaatgcacatcttgattccctatctcatgctctgcttctagaaaccatgagctatcaattgctactggcaatggtcctgggaagtcaaccctaagtatggattctggggttggatgactccccacaggacttcagtgagcaacaatcactgctggcagttggaggacagagtcgctagggcatgtgaccactgtgaaaccaccgatgtttcacctggggtaattttggatgaactacggtagaagcactgaaggtacattgcttttggtttggaagattgtaggtaaataatagcgatatgaatgtggaattggatggctgcaaacgagtgccattgatgcattgaaagaggaaaagtcaggctgtcacctgtcactcagcaatttaaagtgtgagagttgggactagatgtggtggctcacatctataatccagagattcgggggaagcttgaagaggtaggatcttttgagtccaggagttccagaccagcctggacaccagagcaagacctcatctctacaacaaaattttcttaaaaattagatgggcttggtggcacgcacctgtacttgtagatctagctaatggggagcatgagataaaaaaatcacctgagtcagggacttaggggttacaatgaggtatgattgtgccagtgcacacactcccacctggccaacagagtgagattctgcttccaaaaaaataagaaataaatcaggtttgagagttggaaagcatcatcttctcctagagccaaaggacatgtacaactgagacccaggaacaaagcttcatcacaaagagaccatcatcagtggagccgggagatgcattccccctcaccctgccttgaggaggcagtggagtcatctgtctgggatcctttctgacccagccctatttgtttgtctctttggcttctttggatttgtatattttagctgttataacactgtaaaacaaacagagtgatttttttgagttgtgtgaatgatgctagctccatagtcaccctgagagtgatgggaacttttgaatttgtggcaagttggagggtagtgtaagtgacctgagattgccaaattggggctagcactggatgtgaggttaggctagtggaaaaatatgcccagaaccagaggagtgtgggctcactgcaggtggttaggctcagatccaaattgtacagatggatagctttggggtaaagaataacatagttgagaagtgcatgtgttagtctgttcatgcactgctataaagaattacctgagactgggtaattatttataaaactcaggtttaattgggtcatggttccacaggctgtacaaaaagtatgatgctggccatcagctcaacttctggggaggccccagaatagttagagtcatggcaaaaagtacaagggaagcaggctcatcttccacggccagagctggagcaagtggtaggagaggtgatacacactttcaaacaagtaggtcttttgagaactccatcaccggacagcacctatgggatggtgctaaattattcatgaaatatccgcctccataatccactcaactgtcaccagcgcagccagccccacctccaacagtggggattacaattccatatgaggtgtgggtggggacacagctccaacctcaatcagtgggcatcctggattgggtctactatagaaggagaaccaggagctgactatgatcttgaaccctacccatgatggccgggcggggtgactcatgcctgtaaccccagcactttgggaggctgaggtgggtggatcgcctgaagtcaggagttagagaccagcctggccaacatggtgaaaacctgtctctactaaaaatacaaaaaattagaccggcgttgtgctggatgcctgtaatcacaccactacgctccagcatgggaaaaaataccaaaacttcgtctcaaaaaaaaaaaaaaaaaaaaaaaaaaaaagactgcccatgaccactgcaccagtgagagggacaccagcatcactgagatgcaagggctggacattcttcataggtcagagctcaaagcaggggacactgatacagagatgggctccatccatagcaccaaagtggtgagaggatgtgggaatggcagaggccagcactttgccatcaatgcaagggggtataaggaggtgacaccagtgccagagtacatcacggggggactgccctacaatatctaggacttacctcttagagcgtgtttcattagcgacaacagatataaatggcagacaggtgtgtccctgcattaacaggaaatagaaatcatcaagaggaacagaaggcagatgtcagcagccccttagaaagtcatcatccttcatacagttaaaatctgagacagttctcacacgagaaggcctaactcaaaaagaggctgggttctcatgaggcaggtttatgcaaaaccaaggaaggtgtacaagtttggaattctccagtttcccttggaaaagacctacagtcatttgcttaggtaactgagcactgaacaaaggtgagtattgttgtcttttagaagctcttggccaagaaggccttgttggcataaaacccatggtttggaaacatcaccatgacccctgttagagtaatggcctaagggtgggggtcaggaaattgatgtattccttgccaacttctgcctctaagtgagtgaactctgtttgtgaacctctctcctctgtggttatgttcctaggctctcatgtataatcaggagtcatagacttagaaacaggaaaaatacttacagtgtttttgtggcctgtgagctatgacttataattttaggaaaaaaacaattgcaaatggaaagcctaagtctatcaatgctcatccaagacaacataatcaataaaaaccaatatcaaatctcaaggcaaattatttcctgtatatagatggcagagatgagcaccaccatcaaaaactcaaggaccagtgctgtgggtccagtcatctgtttcatggaattcaccagtctggtatcttcaaaatccagaaggatgatggcagatggcaggaaagtaatgcaaacgtcatcaggtgtgaccccactgtagcagctgtgatggatgttttctctcaccatagcaataaataacacaacctcggtcacactgtatgcattgttggtctgcaaaatccatgttttgcaaaactcttcaggaaggtggatctgtaatattggcattgacatgagaacaacagcagtatttattcacaatctcaagctctctgtcttcccgtctctctcattagccatccaagtagtcctgaggaaccaagcccatcagaacattctgcaacataatacacagctccattctccattcaaattttgttgttgttgttgttgttgatgagacaacatcttactccatcagccaggctgacgtacagtggggctatctgggctgactgtagtcttgagcttccaggctcaaggcatcctctcacctcagcctcctaagtggcttgaactacagacacacagcgacatgctgggctagtttttgtatattttgtagagacgtgctctcaccatgttattcaggctggactcaaactcctgagcgtaagtgatccaagcaccttggcctcaaagtgctgagattacaagcctgagccactgcacccagcccaatctccattctactgataacaatgtcattaccaggtctgatggacaggaaatggtaaggtttctgaaaacctaaggatcacacagcgagttccaaaggctgaaagtgcatacctgtcgacactgataccaatgacatccaatggtgagaatgacattccttgtagtcctagctctgctcataacaaatctatactgaagtgtaagagtttgatggtcatggggattttccatgtctctgcctttcagcgatgtgccatatctgtgaagtgttcagaaatgcaacagcctgaggcatgctgggcatatcctctaataaaaaggaaaatgccattttatggtcctgtatttctacaagttggaacacatgggcctgtgatccagatgggggaaatgggaatattcccactcattcaccttcatccacgaagcccatttgaaagctttgggcttcccatccttgtagattttagtgttgtgggctgggtgcagtggctttcacctgtactgccaacactttgggaggcctagacaggtgaatccactgaggccaaaagttcgagaccagcctggccaagatggtgaaaccccgtccctactaaaaatacaaaaattagcaaggtattggggccagcacctgtaatcccagctgctcgggaggctgaggctggagaatcgcttgaacccaaaaggcagagactgcagtgacccgatcctgcctttgcactccacctgggcaagcagaacaaaacttctgtcttgaaaaaaaaaacaaaaaacgaacaaaaaagatgttagagttctgggtttagaggtctataccccagaaagagaatggtttcaacaagggacaaagaagttgctttaaacgttgacttgccatttcttttcagtgtgtttgttctcttgcgtcaagagaccaccagaaaagtggtgcaattactctcctgtcaagaatcattgactatcatctgcaagagggtcagatcctggtatataattagggcagaaatacttagtctgagaagggtatgacatccagaggccctattaatgatgtccttttctccatgcctgactctgaccccatgtgctggactgcccctgtgtggatggcctcatggcctgctcggactctgaggtcccaccccaagtggcacctccatggagggctctactcttgtatgggctctgacactcacactgagacactctcccatggacacctcttcacccacttggggtctgaaactgggctactccatccctccctaacctggaacagagagctttcactgctattacacaagtcatagaggctaactcctcatttttccaagctaattattgaaacattagtcctgggttgataagacaagataagttaacttttcataaatttgcttatcaagttttgaataaattcaaataaattcaccttccccacacaccttagttgtcgacatcacacgcgcacccatactcacagggtgagcacgaaggcttcactgtcagtggagaaagtggcaaaacccttctgtgcctcatcctggtctagacctggccctcatcctttcccactcttcccctcactcccttggattcatccacactggcctcctgcctgctgctccacctccctgcgaagctcacccctgcctcagggcctttgcacgtgcagtggcttcaagccatatcctcttcacccagatctcccagatctcctgaatgatcttcttttatcattcaggtctcagcttgcatgtaatcttctcagtgaggattacccaaaccacatagttcattcattcattcaaatattcattcaatggcatattgacaaagcagctacttcatgccaggccttgggccaggtgttatggatatggcaacaaacaaaacaagagttttctgctctcaaatttttacccacttaaaggagatatcatacatcatctgtaaataaatacatcatctgtaaataatgatgtaaataaatacatcatctgtaaatctgtaaataatgatgtaaataaatacatcatctgtaaataaataaagtataataaaagaaaatagtaggtttttttggttggaggtgaccgtgaagtttgcaaataccatcttacaacacattattttattttatttcatttcatttttaattttattattattatactttaagttttagggtacatgtgcacaacgtgcagatttgttacatatgtatacatgtgtgaagttggtgtgctgcacccattaactcgtcatttagcattaggtatatctcctaatgctatccttcccccctcccccaccccacaacagtccccggtgtgtgatgttccccttcctgtgtccatgtgttctcattgttcagttcccccctatgagtgagaacatgcggtatttggttttttgtccttgtgatagtttgctgagaatgatggtttccagcttcatccatgtccctacaaaggacacgaactcatcattttttatggctgcatagtattccatggtgtatatgtgccacattttcttcatccagtctatcattgttggatatttgggttggttccaagtctttgctattgtgaagagtgccgcaataaacatacgtgtgcgtgtgtctttatagcagcatgatttataatcctttgggtatatacccagtaatgggatggctgggtcaaatggtatttctagctctagatcactgaggaatcgccacactgacttccacagtggttgaactagtttacagtcccaccaacagtgtaaaagtgttcctatttctccacatcctctccagcacctgttgtttcctgactttttaatgatcgccattctaactggtgtgagatggtatctcactgtggctttgatttgcatttctctgatggccagtgatgatgagcatttcttcatgtgttttttggctgcataaatgtcttcttttgagaaatgtctgttcatatccttcacccactttttgatggggttgtttgtttttttcttgtaaatttgtttgagttcattgtagattctggatattagccctttgtcagatgagtaggttgtgaaaattttctcccattctgcaggttacctgttcactctgatggtagtttcttttgctgtgcagaagctctttagtttaattagatcccatttgtcaattttggcttttgttgccattgcttttggtgttttagacatgaagtccttgcccgtgcctatgacctgaatggaaatgcctgggttttcttctagggtttttatggtttgaggtctaacatgtaagtctttaatccatcttgaattaatttttgtataaggtgtaaggaagggatccagtttcacctttctacatatggctagcctgttttcccagaaccatttattaaatagggaatcctttccccacttcttgtttttgtcaggtgtgtcaaagatcagatagttgtagatatgtgacattatttctgaggactctgttctgttgcattggtctatatctctgttttggtaccagtaccatgctgttttggttactgtagccttgtagtatagtttgaagtcaggtagcatgatgcctccagctttgctcttttggcttaggattgactttgcaatgcggggtcttttttggttccatgtgaactttaaagtagttttttccaattctgtgaagaaagtcattggtagcttgatggggatggcattgaatctataaattaccttgggcagtatggccattttcacgatattgattcttcctacccatgagcatggaatgttcttccatttgtttgtatcctcttttatttcattgagcagtggttttagttctccttgaagaggtccttcacatcccttgtaagttgggttcctaggtattttattccctttgaagcaattgtgaatgggagttcactcatgatttggctctctgtttgtctgttattggtgtataagaatgcttgtgatttttgtacattgattttgtatcctgagactttgctgaagttgcttatcagcttaaggagattttgggctgagacaatgggttttctagatatacaatcatgtcgtctgcaaacagggacaatttgacttcctcttttcctaattgaataccctttatttccttctcctgcctaattgccctggccagaacttccaacactatgttgaataggagtggtgagagagggcatccctgtcttgtgccagttttcaaagggaatgcttccagtttttgcccattcagtatgatattggctgtgggtttgtcatagatagctcttattattttgagatatgtcccatcaatacctaattattgagagttttcagcatgaagggttgttgaattttgtcaaaggccttttctgcatctattgagataatcatgtggtttttgtctttgggtctgtttatatgctggattacatttattgatttgcatatattgaaccagccttgcatcccagggatgaagcccacttgatcatggtggataagctttttgatgtgctgctggattcggtttgccagtattttactgaggacttttgcatcaatgttcatcaaggatattggtctaaaattctcttttttggttgtgtctctgcctggctttggtatcaggatgatgctggcctcataaaatgagttagggaggattccctctttttctattgattggaatagtttcaggaggaatggtaccagttcctccttgtacctctggtagaattgggctgtgaatccatctggtcctggactgtttttggttggtaagctattgattattgccacaatttcagatcctgttattgctctattcagagattcaacttcttcctggtttagtcttgggaaggtgtatgtgtccaggaatttatccatttcttctagattttctagtttatttgcgtagaggtgtttgtagtattctctgatggtagtttgtatttctgtgggatcagtggtgatatcacctttatcattttttattgcatctatttgattcttctctctttttttctttattagtcttgctaccggtctatcaattttgttgatccttttaaaaaaccagctcctggattcattaattttttgaagggttttttgtgtctctatttccttcagttctgctctgattttagttatttcttgccttctgctagcttttgaatgtgtttgctcttgcttttctagttcttttaattgtgatgttagggtgtcaattttggatctttcctgctttctcttgtgggcatttagtgttataaatttccctctacacactgctttgaatgtgtcccagagattgtggtatgttgtgtcttttttctcgttggtttcaaagaacatctttatttctgccttcattttgttatgtacccagtagtcattcaggagcaggttgttcagtttccatgtagttgagcggttttgagtgagtttcttaatcctgagttctagtttgattgcactgtggtctgagagacagtttgttataatttctgttcttttacatttgctgaggagagctttacttccaagtatgtggtcaattttggaataggtgtggtgtgatgctgaaaaaaatgtatattctgttgatttggggtggagagttctgtagatgtctattaggtccgcttggtgcagagctgagttcaaatcctgggtatccttgttaactttctgtctcattgatctgtctaatgttgacagtggggtgttaaagtctcccattattattgtgtgggagtctaagtctctttgtaggtcactcaggacttgctttatgaatctgggtgctcctgtattgggtgcatatatatttaggatagttagctcttcttgttgaattgatccctttaccattatgtaatggccttttttgtctcttacgatatttgttggtttaaagcctgttttatcagagactaggattgcaacacctgcctttttttgttttccattttcttggtagatcttcctccatccctttattttgagcttatgtgtgtctctgcacgtgagatgggtttcctgaatacagcacactgatgggtcttgactctttatccaatttgccagtctgtgtcttttaattggagcatttagcccatttacatttaaggttaatattgttatgtgtgaatttgatcctgtcgttatgatgttagctggttattttgctcattggttgatgcggtttcttcctagccttgatggtctttacaatttggcatgtttttgcagtggctggtactgactgttcctttccatgtttagcgcttccttcaggagctcttttagggcaggtctggtggtgacaaaatccctcagcatttgcttgtctgtaaaggattttatttctccttcacttatgaagcttagtttggctggatatgaaattctgggttgaaaattcttttctttaagaatgttgaatattggcccccactgtcttctggcttctagagtttctgccaagagatcagccgttagtctgatgggcttccctttgtgggtaacccgacctttctctctggctgcccttaacattttttccttcatttcaactttggtgaatctgacaattatgtgtcttggagttgctcttcttgaggagtatctttgtggcattctctgtatttcctgaatttgaatgttggcctgccttgctaggttgcagaagttctcctgggtaatatcctgaagagtgttttccagcttggttccattctccccatcactttcaggtacactaatcaaacgtagatttaatcttttcacatagttccatatttcttggaggctttgtttgtttctttttactctctttcctctaaacttctcttctcacttcatttcattaatttgatcttcattcacttatatactttcttccacttcatcaaatcggctactgaaggtattgcatgcatcatgtagttctcatgccatggttttcagctctatcaggtcatttaaggtcttctgtacattgttttctctacttagccattcgtctaatcttttttcaaggtttttagcttccttgtgatgggtttgaacatcccctttagctcagagatgtttgttattactgaccttctgaagcctgcttctgtcaacttgtcaaagtcattctccatccagctttgttccattgctggtgaggagctgcgatcctttggaggagaagaggtgctctggtttatagaattttcagcttttctgctctggtttctccccatctttgtggttttatctacctttggtctttgataatggtgacctagagatggggttttggtgtggatgtcctttttgttgatgttgatgctgttcctttctgtttgttagttttccttcgaacagtcaggttcctcagctgcaggtctgttggagtttgccggaggtccactccagaccctgtttgcctgggtatcaccagcggaggctgcagaatagcaaatattgcacaacagcaaatattgctgcctgatccttcctctggaagcttcgtctcaaaggggtgcctggctgtatgaggtgtcagttggcccctactgggaggtgtctcccagttaggctagatgggggttagggacccacttgagaaggcagcctgtccattcacagagctcaaacactatgctaggagagccactgctctcttcagtgctgtcagatggggatgtttaagtctgcagaaatttctgctgccttttattcagctatgccctgcccctacagatggagtctacagaggcaggcaggcctcattgagctgcggtgggctcctcccagttcgagcttccagaccactttgtttacctactgaagcctcagaaatggtgaacacccctcccccacccagtctgccgccttgcagttccatctcagactgctgtgctagcagtgagcgaggctccatgggcgtgggacccactgagccaggcacaggatataatctcctggtgtgccatttgctaagaccattggaaaagcacagtattaaggtgggagtgtcccaattttcccagtacagtctgtcacgggttccctcatctaggaaaggtaaatcccctaaccccttgtgcttcccggtgacgcaatgccccaccctgcttcagctagccctccatgggctgcatccactgtccaaccagcccaatgagatgaacaaggtacctcagttggaaatgcagaaatcacccatcttctgtgtggatcaggctgggagctgcagaccggagttgctcctattcggccatcttggaatggcaatctatgtttgctttttacatttgaaaaaactggtgtcacgtacctaggtattaatcattgtggtatcctcttgccgatttacctctttatcattaactagtgaccctccttgtcttttgttgttacagtctgtgattttagtctattttatctaatatgagaatagctactctggcacttttttggtttccagcttcatgaaatatccttttccatttccctgttttcatttccctttcggtgtctctatagatgaagttgatttctttaaggcaccataagttgggtcttatttctttatccatttgaccatttagagaatttagaacactgtcagtgttattattcataagtaaaaacttaagagtgggtgtagtggtgtacatctgtatttcctgcactttgagagactgaggcgagctgatctcctggggtcaggagtttgagaccggcctggtcaacatgatgaaaccctgtctctactaaaaatacaaaaattagccaagcatgctggcatgtgcctgtaatccaatttacttgggaggctgaggcaggagaagcttgaacctgggagacaaatgttgcagtgagctgagatcacacagagaagtcatctccactctcctcatcagaacctcttgttcacagcatttgtgagcacaaatcaatgatggttattctttcctactaattagggatattttattacacagcaatagcctccagcaaagggaaccatcatacatgattcctacaagttgacagggctggaattatcactgaaaaactaaggtggctatacttgattcccaatgtccaatttttcatgaatagagaaatttatcctttttccccccagccagaaaccaagttttgctcttacgcccaggctggaatcaagtggcacaatctcagctcactgcaacctctgccccccagcttcaagaaattcaccttttgaacaaggagatattaaggatacactatgtgtatgctaccggtggttgcaggagactcagaaaagagagaaacagtcactggcctcgtgcaactgatattctcgggaggagagaaaggcaatcaagaaagaaacatgctgtatttcagacagctgtaagtcctccacaagaaaagaaagcaggtgaggaacataggaaatgtgtcaaccataaggttcccgctaattctataagttggtcagggatatcctccaagaataagcagcatctgagcaatcacctgaagggaggaaggaaggaagactgtgagtggtggcttacacctgtaatcccagcactttgggaggccaaggagggcagattgcctgagctcaggagttcacgaccactcagagcaacctgttgatacccaatctctactaaaaacacacaaaaaaattacccgggtgtggtggcacgcacctgtagtcccagcttccatgcccagctgatttctctctctccatatatatatatatatacacatatattgtttttgcagagatagggtctcactgtgtcacccagtcatcaagcaattctcttatactgttttggaaaagcatgggaattacaggtgtgaaataccctgctggtcctgaaaaatgtgatatttgggattctctgcctggcttgttttacccaaaataatgacctccagttccttccaggttgctgcaaaagacatgattttcactgttttataactgaatagtattcctgtatgtatacataccacattttctttatttattcttctgttgattgacatgtagggtgattccatgtctttgctactgtaaataatgctgcagcaaatatttgtgtgcattttgatctattcctttgagtaggtacccagtactgcaactgcaggactgagtagttgttatattttttgttctttcagaaatctccatagtgtttgccataaaatctgcactaatttacattcccaacaacaatgcataagatttccccttttctccacattctcactaacatttgttatgtttttgtctttttcataatacccattctgactggagtaagatatctcattgtggtggttgttgatatttttgagacggggtctcactctgttgccagactggagtgcagtggtgtgatcgtggcttgctgcaacctccacctcccgggttcaagcaattctcctgcctcagcctcccgagtagctgggactacaggcgcgtgccaacaggcctggctcattttttgtatttttagtaaagacagggtttcaccatgttggccaggatgatcacagtctcttgagctcatcatacacctgcctcagcctcccaaagtgttggaattacagtcatgaggcagcgcacccaacctcaatgtggttttaatgaccatttctctgacgattcatggtgtggagaatttctttgaaataccttttggccatttatatgtgctcttttaaaaactgactcctgtccaggtgcggttgagcatgcctgtaaccccagaacttcgggaggctgaggccaatggatcacttgaggcaaagaggcagaaatcagcctggccaacaaggcaaaaccccatctttactaaaaatacaaaaaatcagccacgggctgtgactcgtgcctgtggtgcaagttactcaggaggttaaggcacaggaattgcttgaacccggtaggcacaggtcacagtgagccaagatcatggcactgcactacagcatgggtaatagagaaagacctgtctcataaaaacaaatgaataaataaataagataaaaaataaaaaagtctctttatgtcctttgccgactttttaatgggattctttggagttttctgttgtagttgagatctttgtttactctcggtattagtcttttgtcaaaggaaaagtttacaaataatttcttccgttctgcagtttgtctgctcactctgttgagaggattatttctttggctgtgcagcagctttttgtttcagtaaagcttttgaatttatataattaaaattttcagtttggtttaaatttgcactggtcgatttttggttttgttgcctgtacttttgaagtcatactcttgaactctttactagacaataaccagaagagttttctctagttttcttctcacatttttattatttcagtacatatatttaagtctataattcatcttcaattgatttttgtagaaatagtgagaaataggagtccaggtttattcttctgcaaatgacaattcaattgttccagcaccaattattgaaaagggtgtgctttcctcaacgtatattcttatcagctttgtcaaagatcagttggctataaatgtgtggctttctttctgggctctctagtctgttacatcaatctgtgtgtctatctgtatactactaccatgctgtattggtgatgatggctttgtaatataatttgaagtcaagaaatgtgatgctcccagctttgtttatttgcttcagaaaggctgagtcaacagctgcagagatgaagctgcccctcctcgcagggctccttcccggaaaaagatcatggctcccactgaccatataaccatggctggaactcctgaaattcccaaagggaggccctacccagtgaggggggatgaatgaaggtcctacttaaggaatctgtctggccacaatcaggcacagcagctgtgctgccttgtgggggaccagaccacctggattccctggagcctgcaggctagaatgtctgagtccatggaaacacagaaatggaggccgccctcacctccccagaaaactgtagtctcaggcagtctccagccgattgccactggttggctgctattccaagccagtgggtcttaacttgagaggtgctgtggaagtggggcccacggaatgaggctgcttggctccctggattcagccccttttctaagggaatgtacagatggaactcccgccttgcccagctttccaagtatataaaactcctgagtctctgtgagtgtctgagcgagtgctctggcaacattcgacacggctctgtgtatctgacccaagacccttatggcatgagctaatgggaggatcttctgatccatgcgtggcaaagatgcatgggagaaacatggtttgtgggtaggggttgtgcattcactactgcttctcttggctgtaggtgaaggtttctttggctctgtgctgatactgggtgcaccatcacccaccccctttgtttcttctcctgggtcaagtcatttgcctaatcagtcccaatgtaggaacctggatacttcagttcaaggtgctgaattcaccgtgcttttcattcaggggaagacagctgcttctcattgggcatcttggcctgcccacttcacgtcactttttgtaaaatccacaccactccaggaatatccattacttaacttcgcctgaaataaacagaaggctcattacacttatcatgggctcacttacttcgcctataatgaaggtgccatggaaatgctagtggatgacgtggtccattttcttagggatgagatagaaaaatggtgtatggctttttaatttaattaaaatttttagtttggtttaaatttacattggtctctttttggttttgttgcctgtacttttgaagtcttactcgtgaactctttactggacaatgaccagaagagttttccctaagtttcttctgatattttgaccatttcagtacatacatttcagtctataattcactttaaattgatttttgtaaacatggtaagaaataggagttcagatttattcttccgcatatgataatgcaactgtcccagtaccaattattgaaaagggtgtgctttccctagtgtatattcttgtcagctttgtcaaagatcagttgcctatgaatgtgtggctttcattttggattctctcgtctgttacatcaatctgtgtgtccacatttatacctgtaccatgctgtattggtgactatggctgtgtaatatattttagagttaggaaatgtgatgctcccagctttgttcatttgcttcagctgaaaaggttgagtccacaattacaaagatggcagccgcccatccccggaggacctccaacccagaaagagatcaggcttcccaccaaccctataaccctggctggagttcctgaaattccaacagggaggaccttcccagtgaggagggatgaatcaaggtcaaatttaaagaaacagtctggccactatcaggcacagcagcagtgctgccttgtgggggacccctcctgctccagaccagctgccctccctggagcccgaaggctagattgtctgagtctacggaaacagagacggtggccgccccaaccacccagaactcggtagtctcaggcacttggcttgctatcttgccactgcttggctggtattccaagcccgtgggacttgagaagtgctgtgatgatggggaccacaggatgaggctgtctggctccctgtgatatggctgtgatgagtggaggaacaccagggctcatgtctcacacagaattggagaaaatgacacaaacacatgtacagtggttttatggcgtgcagtttaataggcaagaacgaaggaagagctccccatactgagacagagggaggggggctccaaagccaaaagaggaaacccggagtgctgtggataccaatgagttatatgaagaaactggagggggcggtgtctgatttgcatagggttcaggcgattggttcgaccaggcatgtcatttatgtggcccacggaaaaactggccctcccacctagcctttgaatatgcacgtgccggacaccctgatttcctacactcatggggatatatgggggtggccatatcgccaggcacaggtggggacaagggccagaagagggcgggaatcgctatgtttgggtggacccagtttctaatggccggcatctgcagatcaaggttaccggagaactctaaaagccggggctttcctgctagacaagactcatttctggagctgctttaaaaagaaacaaaacttcccaaggaccccttttcctccctgtctgcccaaaataatttcttaacaactcgtataacacctgaattcagcccccttactgggggaatgtaccaacggaactcccacctttcctggtttctcaaggctagattgtgtaaacctcctgggtctcggtctgtgtctgagcagctgctctgccaacactccacacagccctgtgtactaggcccaaggccgccgtgactcagcccatgggaggatctcctgatttcttggttgcaaagatccatgggagaaaaatggtttctggggcggggtcacacactcatggcttctcttggctgtgcaagaaggttcctttggctctgttccaatatagcgtggttcatcacccacccctgttttctttgttctcctgagtcaagttgtttgcctagtcagtcccaatgtgagaacctgaatatttcagttcacgtgcttatcgtgaaattcactgagactttaattcagtggaaggcagcctcttctaattggccatcttggcccgccccctccacgtcacctcccataaaatggccacgctctccagggacgatgccattatatatctttacgtgaaaccgacagaacacttattacactttttgtgagctcatttacttcacttataatgaacatggccatggaaatgctagtggagaaagtggtcgattttctgatggatgtgataaaaaaatggtttgccgaccaattaatgacatatgtctcaaaactagtaacgagacccttaatcgctgggttgaagtttctaatcaagaagatgctcatctatgtattcaacaaagcagcttcccttgcttctgaaatgcttccaaacaacatctcatatttcctgaagaagataatgcctggacaagcagcacaagtcattcaggtttactttcagctcataaatccagcaggatattcgcacaattgttgggaaaccttatcagttcatgagtcgtgcatgtttcctttaatttcaggaggaagagggtaatctggaagagtttcctgacctactctgctgctgtgattaaacaaccaccaggaaattttgatgacactgttctcctgagctcctccctttcctcggggaagaaaagcattgaaactacaaaaataaagtgttatttggctggagtgaggtctcatgtctgcttatgcggtggctcgctgctcagaacagggtgagtctctgagttgtacgctgaggaggggaggctgtcaatctagaaaaaacccattgcatgggacacctccatggggtctggggggctgaggatgaggagctggactggatctagggaaggaggaggtttcagagggtgaaattctggcagtaaatcctgggggtgtttgaaaacttcctccctcagaaggagaagactcagggaggaataaggacaaaccatgggtcccttgaggggcatttactaacttaagaggactttatcgggaagcagagtgacaatggcctccttgaggactgaggcccctggataaatgaggcccagatccagatccagtccatgggagatgagaccttcaagggacatatttttgttgggacagaggaaaagtgcagctctgcagctgcagaggaagccttggcagtgtgaaagcgaccttggagggggccctgtgcgttctgaatgcttctgaggtccatcccctgtccccgcctctttttctggattttttgggctccatggtctccgccatcttctgagcgctccacgctgccaccttcagttttctcttctgggctccaaatactccaaaatctttcatatctgtgcccctacccctgtttttagcatgtgttgggactccaggtccctgaaggtttctggcctgaaatccacctccccagcggtgtggattctgctctagagaccccgcacttggcaaggttcccaggcccctgggggacaaccgagtggtatgtgcacttcagggctccacactcggcaaggtctttcaagcccttggggttccctcctcagttttcttcacatgtctgggatgtagtcactctataaatgccgggatgtgatccccaccccagtgattttttttagttccatgagtgttgctatctgaatagtcatcctgagagtgatgggaccttttgaatttgcagcaagttttagattagtgtgagtggcctgagatcgcaaaactggggctagcattggatgtgaggttaggctggtggaaaaatttgcccagaacctgaggagtgtgggctcactgcaggtggttaggatcagcacagaattgcaaggatgtatagctttggggtaaagaataacatggttcagaagtacatgtattagtcttttcatgcattgctataaagaattacctgagactgggtaattaattataaaaactcaggtttaattggctcatggttccacaggctgtacaaaaaggatgatgctggccatcagctcaacttctggggaggcgtcagaaaacttagagtcatggcaaaaagcacaagggaatcaggctcatcctccatggccagagctggagctagtggtaggagaggtgctgcacacttttgaacaatcagatctttttagaactctatcaccagacagcacctagaggatggtgctaaattattcatgaaatatccacccatatgatccactcaattctcaccggcccaaccaggaccacctccaccattggggattacaattacacatgagatgtgggtggggacacagatccaaactcgatcagtgggcatcttggactgggtctactatagaagaagaaccaggagctgactatcatccttaagactgcccatgatggccaggcagggtggctcatgcctgtaatcccagcactttgggaagccaaggtgggtgaatcccctgaggtcaggagtttgagaccagcctcgccaacatggtgaaaccctgcctctactaaaaacacaaaaaattagatgggtgttgtgccagacgcctgtaatcacagctactccagaggctgaggcatgagaattgcttgaacctgggaggcggaggtggcggtgagccccaatcgcactgctacactccagcatgggcaacaataccaaaacatcgtctcaaaaaaaaaaaaaaaaaaaaaaaaggctgcccatgaccactgccccagtgagagggacaccagcatggctaagatcaagtgctggacattcttcatgggtcagacattaaagcaggccacactgttacagagatgggctccattcatagcaacaaagtggtgagaagatgtgggaatggcagaggccagcactttgccatcaatgcaaggtgggcataaggagctggcaccagtgccagagtgcatcaggggaggactgctttgcaatatctagcacttacctcttagagtatgtttcattagggacaacagatataaatggcagacaagtgagtcccttcagtaacaggaaatagaaatcatcaagaggaacagaaacagatgtcagcagccctcatataaagtcatcatccttcatccagttaaaacctgagacagttctcacataagaaggtctaattcaaaaagagactgggttctcatgaggcaggttcatgcaaaaccaagggaagtatacaactttgggattctccagcttcccttggaaaagacctacaatcatttgcttaggtaactgagcactgaacaaaggtgagtattgttatctttcagaagctgttggccatgaaggtcttgctggcataaaacccatggttggaaacatcaccatgacccctgttagagtaatggcctaagggcaagggtcaggaaattgatgtattccttgccaacttctgcgagacgagtgttggtccactcatctctttcacggaattcaccagtctggtatcttcaaaatccagaaggatgatggcagatggcaggaaactaatgcaaacaccatcagttgtacctccactgtagcagcagtaatggatgttatctcttcattgtaatatccagggagggagaagatgacattattctcaatattctaaacaccctgtgtgtacagcctctgtgatattttttgtaatatccgtgtgggagagaattatattactcctaatatctcaggggttgtgccccctctgtgacaatgttcctaacacccaggaggggataggatgatatcacttttagcatcacagggggtgtacaccccactgtaatattgttcataatatccgggggggagagaatgatattactcccaatatcgcaaagactgtacaccaacctgtgatattatttgtaatatccataagaggaagaataatattactcccaatgtcacaggaagtgtacacccttctgtgatattgttcaaaagatccagttagggaggggatgatattactctcaatatcttaaacaccctgtaggtaagccctctgtgatattcctcataatatccagagggagaggatgatattactcccaatattgcatgaagtctacaccccacctgtgatattgttcctaatatccaggatgggagaggatgatattactcccaatgtcgcaggggatgtacaccttccctgtaatattgttcgtaatatctagaaaaggagaggataatattactttcaacatcgcagggggtgtacaccttccttgttatattgttgctaatatccagggaaaaagaagatgacattaccaccactattgcagaaggtgtacacccccccttgatatagttcctaatatccagaaaaggagaggagatattactccaaatattgcaagaggtgtacattcccctgtaatatttttcctaacattcaggaagaaagagagtgatattgcccttaatattgaagggagtgtgccccccccgtgatattgtttctaatatccaagaaatgaaaggatgatattactcccaatatcacaggggctgtacagccccctcccatgatattgttcccaacatcggggggggggtgaaatagtattattcccagtatcacaataggtgtacacacctgtcgtgatattgttcctaatacccatgggggaaaggacgatattattcttaatatctcagagggatgtacaccctccctgtgatattgttcctaatatccggggtgggagaggatgatattacccccaaaatctcaaagggtgtacacccctcttgtgatattgttcctaatatccagggtggagaggataatattattcccaatatccaggaaaggaaacgatgatgttactgtgaatattccagggggtgtcctcccctctgtgatattgttcctaatatccaggttggggagattatgatatttctccaaatatcacaaggggtgtacaccaaccctgtgttattgttcctaatatcgatggggggagaggacgatattactcccaatatcacagggggtgtacaccacctttatgatattgttcctaatatccatgaagaaagaggatgatattactttcaatatcgcaggggatgtacactccccctgtgatattgttagtaatacctaggagaagaaagtgtgatattactcccaatatcgcaggggatgtacacgcttcctgtgatattgttcctaatatttagggggaaaggggatgatattactcccaatatcgaatggtgtgtacacccccccgtgattctttttttttttttttttttttttttgagatggagtcttgctctgccgcccagactggcgtgcaatggcgcaatctcggctcactgcaacatttgcctcccaggttcgcacgattctcctgcctcagccttcggagtagctgggattataggcagctgtcaccataccaggctaatttttgtatttttagtagagttggggtttcaccatgttggtcaggctggtcttgaattcctgacctcaaataatccacccaccttggcctcccaaagtcctgggattacaggcataactttccctgtgatattcttcctaatattcaggaagaaagaggatgatattgctcccaatatcgcagagagtgtgcactcctcctgtgatatggttcttaatattcagaggaggagaggatgatattactttctatattgcagaaggtgtacacctccctcgtgatgtctttcctaatatccagtgggggagaggttattagtctcaaaatcacagaaggtgtaaacccccatttgatattgttcctaatattcaggggtggggagagaaaggtattactcctagtatttcagggcatgaacacccccaccgtgatatcattcctaatatccagaaggggaggcaatgatatttctcctaatatcacaaagggtgtacaccccttctgtgatattgtaaatattctgtgtgtacacccccctgtgttatagtctgtaatatccgggtgggggagagggtgatatttctccccatattgtaggggatgtacacccttctgtgatatggttcgttatatccagggaagaaaaaggtaatattgctgcccatattgtggagagtgtacacccccatgtaatatggttcgtaatatccaggagtggagagggtgatactgctccttacatcgaggaaggtgtacaccttattgttatatgattcgcaatatccaggggaggagagagtgatattgctccccatgtcgcagggggtgtaaaccctccgtgatatgattggtaatatccaggaaaggaaagggtgatatttctccccatatcgcgggggacgtacatcctcctgtgatatggttcgtaatatccaggaggaaagaggaaaatattgctcttcataacccgaggggtgtacaacccctgtgatatggttcgtaatacccagaagtgtacacccctctgtgatatggtttgtaatatccagggggttagagggtgatattgctccccatatcgcagtgggggtacacccccctggattggttcataatattcatggggggagaaatttacatttatcctcatatcagggggggtgtacaccccccgtgatatggttcgtaatatccaggggaagaaagggtgatattgctccttatatcgcggaaggatcaccctcccctgtgatatggttcataatacccagacgggaagagggtgatattgttcttcataaagcgaagggtgtacagccccctgtgatatggttcataatatgcaaaaggggagagggtgatattgctccccatatcacggagggtgtactcccttctttgatatggttcgtaatatccaggggtgtagatggtgatatagctcgccctattggggagggtgttcacccctctgtgatattgttcgtaatgtccagggaaagagaggatgatattactcccaatatcgcagaaggtttacaccactctgtgatattgttcataatatccagggaaggagaagacgatattactcccaatatggcagggggtgtagaactcctgtgatattgtttgtaatatccaggcaaggagaggatattactctcaatatcgcagaaggtttacacccctatgtgatactgttcatgatatccagggaaaaagaggatattactccctatatcacaaagggtgtacacccctttgtgatattttttgtaatatccaggggagagaggataatattactctcaatatcagaaggggtgaaaaccctcctgtgtcattgttcataatatttagggaaggagagagtgatattactccaaatatcacagtgggtgtacacccccctatgatattgttcctaatttccagaaggggagatatgatattattgccaatatcgcagaaggtgtacaccttactctgacattgtttgtaatatccagatggggaaatgatgatattactcctaatatcacagggggtgtacacccccttgttttattgtttgtaatattcaggggaagagacgattatattactcccaatatcgcagggtgtgtacaacactctatgatattgttcataatatccaggggaggagaggaagtgtacacccccccgtgatattgttcgtaatatccagaggtagagaggatgatattactcccaatattgcaggtggtgtacacctttctgtgatattgtcatgatattaagaaggggagaggatgatattactaacaatatcacaaaaactgtacactccctgtgatattgttcataatatccagaagaagggaggatgatattattctgaatctcgcagaagatatacaccaccctgtgatatggttcataatatcctaggggaaagaggatgacataactgtcaatatcgcagggggtgtacaattccctgtgatattgttcacaatattcagagggaaaaaggataatattactttcaatatcgcaggcggtgtacacattactgtgttattgtttataatatccggaatgagagaaaattttctcccaatatcacaggaggtgtacactcccctgtgatattgttcgtaatatccagggaggggagaggatactattactcccaacatctcagggagtgtaggccccccctttgatattgttcctaatattcggaagtggagaagatgatattacttccaaaatcgcagggggtgtacactccctctgtaatattgtttctaatattcatgagtggaaagaaagatattactcccagtattgcaggggacatacaccacactgtgatcttgttcacaatattcgggggggagaggatgatattactcccaatatcaaagtaggtgtacacccccttctgatattgatcgtaatatccagaattaaagatgataacgttactcccaatattgcagggggtgtacatttttgaatactgttcataatattaagagggggaggggatgatatctgtcccaatatcgcaaagtgtgtacacctcctgtgacattgtcccaaatatccagaggaaaaaaggatgttattactcttaatatctcagagagtgtacacctccctgtgatattgtttgtaacatccagaagaaagaggctgatattactcttaatatcgcagggggtgtacacccccgccccgggatattattcgtaatatccagggggaagtggaatgttcagaatgggagaggatgatattacttgcaatatcatagtgggtgtacaccccactgtgatattgtttgtaatatccgggaaaggagaaaatgacattcctccccatatggcaggggctgtacaccacctatcatattgttcaaaatatccagaaggggagaggatatgtctccaagtatcacagggggtgtacaccccgctgtaatattcttcctaatatccagggtgtgagaggataatagtactcccaatatcccagggcatgtacaccccccttgtgatgttgttcctaaaattcatggggagaaagaatattactcccaatatcacagggggtgtacatacactctgtaatattgttgccaatatgcagcaggagagaggatgatattactcccaatatcacaggggctgtacaccccgctgggatattgtttctaatatcaagggggaaaaaggatgatattactcccaatgtcgcagggtgtgtacttcctctttgtgacattgttcctaatatccaggagagaagagggtgacattccttccaaaactgaaaggggtgtacacaccctttgagatattgtctttaatatccagaacgaaacaggatgatataactcctaatactgcaggggggtacaccctctctgtgatactgtttctaatatccaggaggggaaagaaaaatattaatcccaatatcacagggggtgtacattccccctttaatattgttcctaatatccaggaagacacaggatgatactatttccagcagcacagggcatgtacacccctttgtgatattgttcctaatatccaggaaaagagaggatgatattactgtcaatattgcagggcgtatacactggttctgtgatattgtttctaatatccgggggtggagaaaatgatattactcccaatattccagcgggtgtacacccgttctatgatattgttcctaatatctgggggagagagaatgatattattgtcaatatcacaggggatgtacagattccctgtgatattgtttctaatattcacagggggagaagggtataatactcccgatatcgcagggggtgtacactccccctgtgaagttgttcctaatatccagggattgagagaatgatattactcccaatatcacaggcggtgtaaaccccctgtgtgatattgttcctaacatccagaggaaaagatgatgatattattttcaatatcacagggggtgtacgcatccctgtgatattgtttctaatatccaggggaggagaggatgatattattgttaatatcgcagggggtgtaccccaccctgtgatactgttcctaatatccggggtggaagaggataatattgctcccaatatcgcaaagggtgtacaaccttcctgagatattggtcctaatatccagggagggagaggatgatattactttcaatatcacagggagtttacacaacccctgcgatattgttcctaatatccagcggaagaagagttaggataatactattttcaaaattgctgggtctgtaccccctccccgtgatattgtttctaatatccaggaggggagaaagtaatatgactcccaatatcttagaagatgtacaccctccccataatattatttcttacatccagggggtagaggatgattttgctttcaatatcacagagggagtaaacctttccggtgatattgtttttaatatttaaaaagagagaagataaaattactcccaatacaaaggggatgtattgtgtactcccccctctgatattcttttttaatatccagatggagagaggatgatattactttcaatattgcatgggatgtataaatcccctgtgttattgttctgaatatacaggtggggagagtatgatattactccaaatatcgcagggggttctttccccctgtgatattgttcctaacattcagggagggagaggatgatattactcttaatattgcagggggtgtacccacgcctatgatattgttcctaatatccagagggggagaggatgatctaactcagaatatgacaaggggtgtacacacagcctgtgatatggttcctaatatacaggggagaaggggataatatttctcccaatatcgcagggggtgtacaaccccctgtgatactgttcctaatatacagaaggggacagcatgatattgttcctaatatcgcaggaggtgtacaacgccctgtgatattgttcctaatatccagggcgggagaggatgatattaccctcaatatcgcagggggtgtgcactttccctgttatattgttcctatgatccgggtggggggaaatgacattagtcccaatatcgcaggatgtgtgcaccgctcccccgtgatattgttcctaatatcaagggggagagaggaggatattactcccaatatcgcaagggatgtacatcctccatgcgatattgttcgtaatattcaggaggagagaggatgatattactcttaatatcgcagaaagtggacacccaccctgtgatgttcttcataatatccagggaagcagacgattatatgactttcaatatcgctgggagtgtacatcccttttgggatattgtttctaatatccaggaagggagaggattatattactctcagtattgcaggcagtgtacaccttttttgtgatattgttcctaatattcagaaagggaaaggatgatattactcccaatattgcaggtggtgtatatccccctctgatattgttccttatatcaaggaagagaaagaataatattactcccaatatcaaagacagtgtagacccctcctgtgatattgtatttaatatccatggggaaagaggatgatgttactcccaatatcgcagggggtttacacccacactgtgatattattcctaaaatccagtggaggagaaaataatattgctcccaatattgcagggtgtatacaggccctcccccgttatattgctcctaatatccagcggtggagaggatattactttcaatttgtgtagggagtgtatacccccctgtgatatttttctaatatcaaggatgggaaaggatgacattactcccaatatcgcaggaggtgtacacgccctgtgatattgttcctaatatctagggaaggagaggatgatattactttcaatattgcaggagctgtacaccctctgtggtattgttcttaatatttaggttgggagaaaatgatatgagtccaaatatcgcagaaggcatacacacttccaataacattgttcttaatatccgggggagagggtgatattactcccaaaatctctggggggtgtacacccccttctgatatttttcctaatatccagggaaggaaacgatgatattactataaatattccaaggagtgtacaccttcctaatatcctaatattgttcctaatatccaggggtgggagaggattatattactcccgatatcgcagtgggtgtacacccctcctgtgatattgtttctaatatccaagctaggagaaaatgatatcactctcaataccacagggggtgtacaccttccgcatcatattgttcctaatattcagagggaaagaagatgaagttactttcaatatcggaggggttgtacacaacccctgtgatattgctgctagtatccaggaagaaaggggattatgttactccccttatagcagggggtatacacctcccctgtaatattgttcctaatatcaaggctgggatatacgtggggggaaggatgatattactcccaatatcgcaggggttatacaaccttctgtgatattgctcctagtaaccagggcagaagaagatgatattactcctaatatcgcaggaggtgtacactcccccattatgttgttcccaatatgcagaaaaggagaggatgacattattgccagtatcgcagggtgtgtacaccacccctgtaatattgttccaaatatttagggggagagaggatgatattactcccaacatcgcagggggtgtacacacatcccctgtaatatagttcttaaaatctaggggaaaaggggatcttatttctctaaatattgcagagggtgtacactccccggtgatattgttcctaatagccgggagggagataattaaattactttcaatatctcagagagtgtacatcgcccttgcgatattgttcctaatatccagagcaaaagagaatgatattactcccaatatcttaggagtgtacatttaacctgtaatattgttcctaatatccagggggaagagaatagtattactgccaatatcgtaggggttgtacaccttttctgtgatattgttgcaaatatttagtagagggaaagaatattactcgcaatatcacagggaatgtatacttcccctgtgatattgttctgatatccagaaaaagagagggtaatattactcccaatattgcagggggtgtacaccccccttgtgatattgatcctaatataaaggaaggaagaggatattactcctcatatagaaggggttgtccaccccccttgtgatattattcctaatattcagggaagcagaggatgatattattttcaatatcacagagggtgtgcagtccacctgtgatattgttcttaatattcggggggagaggatgttattatgcctgatatcgcagtagaggtacacccctcaagtgatactgttcctaataaccaggggtgaagaggatgatattactcccaatatcgcaggtggtgtacacccccccatgatggtttctaatatacagagggggagaggaaaatattactcccaaaatcgctggaggtctacaccccccttgtgatattgttcctaatatccaggaaaggaaacgatgatattactgtgaatattccagggggtgtacacccgctttgtaatattgttcctcatatccagggtgtggagaggattatattactcccagtatcgcagggggtgcacgacgcccctgtgatattgtttttcatatccaggaggggagattattatcaatatggcaaggggtgaacaccccctgtgatattgtacttaatagttaggttggcagaaaatgatattagtctcgatatcgcagggggtgtgcactccgcctggtgatattgcttttaatatcaagggggagaaaatggcattactcccaatatcgcagggggtgtacaccgctcatgtgatattgttcctaatatccaggtggagagaacataatattactcccaatatcgcacaaggtgtacacccctcctgtgatatggttcctaatatccatgggaggagatgatgatattactcccaatatcacaggggatgtacaccacccttgtgatattgttcctaatatccagggaagaaaacgatgatattattgtgaatattacagggagtgtacacactccctgtgatattgtttttgatatacagggtgggagaggatgatattactcccaatatcacataaggtgtacaccccccgtgatattgttctaaatatttcggtggggagaaaatgatattagtctccatatcacagggggtgtgtgctcctcaggtgatattgtttttaatatcaagagggggaggagattatattactttcattatcacagggggtgtacacccctcctgtgatattgttccttatatccaggcgaggggaaaataatattactctcaatatcgcaggaggtgtacacaccccatgtgatattgttcctaatattaagggggaaagaagataatattactttcaatatcacagggtttgtactcctttcttgtgatatagtttttagtatccagggggaaagagcatgatattactcccattgtagcaaggggtgtacacacctcctgtgatattgttcctaatatccagaagtggtgaggatgatattactcccaatatcgcagggggtatacaccccacctatgatattatttctaatatccatgggaaaagagtatgatattacacccaatgtcgcagagggtgtgtatttttcctgtgatattgtttctaatattcaggcggggagaagatgatattactctcaatatagcagaaattgtacatccccgctgtgatattcttcataataatcagggaaaaagaggatgatattactaccaatattgcaggggggttacacttcccctatggtagtgttcctaatatccaggaagaaagaggatgatattaatcccattatccaggaagtgtacacccaccctgtcatgttgttcctaatatccagcagggaagaggatgatattacaccccccccccgtgatattctccttaatatccaggaggggagaggctgatattactggatatatagcaggggtgttcataccttctgtgatattgttcctaatatccagaaaaggagaggatgatattacttccaatatcgcagaaggtgtacacctccctgtgatattgatcctgacattcagaaggggagaggatgatattactcaaaataccgcagggcatgtgcattcccttgtgatattgttcctaatacccagaagggaacaggataatattactttcaatatcgcagggagtgcacacccccctttggtatggttcttaatatccagaaggaaagagggtgctattactttccatattgcaaggggtgtacaccccactgtggtatggttcataatatccaggcagggagagggtgctattactccccacagtgcggggcatgtacaccctgctgcggtacggttcctaatatccagggggagagaggatgctatgactccctatatcgcggggtgtgtacacccctgtgtggtatgttttgtattctccaggaacggagagggtgttgttacccctcatatcgctggaaatgtacactcccctgtggtatggttcgtaatatccaggggattgagggtactgttacccccatactccccatatcgtggggggagtgcacctccctgtggtatggttcgaaatatccagggtaagagagggtgctattattccccattttgcaggaggcgtacacccccctatggtatggttcgtaatatccggggtgaggggatgctatcaaaagaagagagaaagagaccccccatattgttctatattattttatactcagtacctgttttaagaagaaacaaggaagtgaaaccaaaagcaggcagcccggcgccaggcaccagacccaaaaccagacccgaaaccaggcctgggcctgcctgaccttagcctgatagttaaaattcaacccatgacctagcaaccaatgttatccatagattccagacattgtatggaaggacattgtgaaatttcttgttctgtgctgtttcactctgattaccggtgcctgcagcccctgtcacatacccactagattgctcaatcaatcatggccctttcatgtaagatctttagtgttgtgagcccttaaaaaggacagaaattgtgcactcaacaagctcggattttgagacgctagtctttcgatgcttccagctgattaaaagccacttccttcactacctcggtgtctgtggggttttgtccgcgactcctcctgctacactatgactccccatatcaaggggggtgtacacccccctgtggttcgtaatatccagcaggggaaaaggtgctattactccccatattgcagggagtgtacacccccttgtagtatggatcgtaaaatcaaggggggagggaaggtgtaattatccccatatctcagggggtgtacacccctttgtggtaaagtttgtaatatccagggatattacagggatattatccccaaattaatacttttataatttcttatgcctgcctttactgcaatctctgaacataaattgtgaagatttcatggacatttatcacttccccaatcaatacttttataatttcctatgcctgtctttactttaatctcttaatctcatcatctttgtgagctgaggatgtatgtcgcctcaggaccctgtgatgattgcattaactccacaaattgtttataaaacatgtgtatttgaacaatatgaaatctgggcaccctgaaaaagaacaggataagagcgatgttcagcgaacaagggagataagcataaggtctgactgcctgtggggctgggcagaacagagtcacatttttcttattgcagaaaatgagtaggagaaatatcactgggaagggaacgcattcctaggggaggcctatggacggccgctctgggggtgtatcccttatgtggttgaagataagggatgaaatacaccctggtcccctgcagtgccctcaggcttgctaggattagaaattccagcctggcgaattctagtcagaccagttctctgctcttgaaccccgtttcctgttaagatgtttatcaatgacaatgcgtgcacagcaggacatggaacctcaatagtaattccattttctccctggccttgtgaccttgctaggcccttctgcccttgtgatcttttattgccatttgaagcatgtgatctctgtgacccactccctattcgtatccccctccccttttgaagtccctaataaaaacttgctggttttgcagatcaggtggtcatcacagaacctgccgatatgtgatgtcaccccggaggctcagctgtaaaatttctctttcgtactctttcactttatttctcagaccaggtgacacttaaggaaaatagaaaagaacctactttgaaatattgggggctagttcccccaatagacattgttcctaatatccagaaaaaaagaagatgatattactcccaatatcacaggggttgtgaaccccacctgtgatatggttcctaatatccaggaagggagagaatgatattactctccatattgcagggggtgtgcacatccctgtgatattgttcctaatatccaggggaggagagggtgatattactcccaatattgcaagggttgtaaactccaccctgtaatattgctcctaatatttaggatttagggggggagaggataatattactcccaatatcgcaggggatgtatatgccctctttgatattgttcctaatatccagggggggagaggataatattactttccatatcacaaagagtgttcacccccctgtgatattgttcctaatatccaaaaaggaagaggatgatatcaatcccaatatcacaggaagtgtacaccccccccttttatattgtttctaatatccaggggaaatgagggtgatatttctctcaatatagcagaatgggtacactccccctgggatattattcctaatatccaggggaaaaaaagaggttgatattcttcccagtatagcagggaatgaatacaccctttgtgatattgcttctaatatcaaggggaaaagaggatgatatgactcccaatatcacaggggatgtaaacctgtggcgttgttgctaatatcaaggagggaagagtatgatattactcctaatgtcgccgaaggtgcacactttccctgtgatattgttcctaatatccaaaagggaagagaatgatattacccccagtattgcagggtgtacaccacccctgtgatattgctcctaatacccaggaaaaaagagaatgctattacccccaatatctaaggggacgtataccttccctgtgatattgtttctaatatccaagtggggagaggatggttttactctcaatattgcagggagtgtacactccccctgtgatactgtttctaatactcgggctgggagaaatagtattactcccaatatcgcagtgatattgtttccctgtgatattgtttctaatatctagtgggggagataattatattactaccccatacacaggggagggtgtacattcccctgtgatattgtttgtaatatccagggaaggagaggatgttactcccaatatcacaggggttgtacaccccttttttgatattgttcctaatatctggggggcagagaattatattactgtcaatatcacagagtgtgtacaccccctctgttatattactctttatattcagggcggtagaggatgatattactccctatatcacagggggtgttcacccctcctgtgatattgtttataatatctaaggggaaagaggatgatatcactctcaatatcaaaggaaatgtacacctttcctgtgatattgtttttattatataggggggcagaggatgatattaagaacaataccacaggggatgtacacccacgtattgatattgtccctaatatgtatggggaaagaggacagtgtaactcccgatatcgcagagtgtgtacacccccttgtgatattgtttctgatatacacggggagaaaagataatatttcttccaaaattgcagggggtgtacaaccccctgtgatattgtttttaatatccagtgggggagagaatattactcccaatattgcagggcgtgtacacaacccctgtgatattgttcctaatatccagagtaggggaggatgacattactttcaatatcgcaaggggtgtacattcccctgtgatattgctcctaatatccatgaggggagaggatgatattattcctaatatggcaggggctgtacaccttccctgtgatattgtttctaacatccagtgggggagaaaatgatattactccctatatcacagaaggtgtacactttccctgtgatattgttcctaatatccagaaggggagaggataatattactcccaatatcgcaggaagcttacaactcccctgtgatattgtttctaatatccagggaggtagggatgatattactcccaatatcgcaggggatgtacactcccccgtgacattgtttctaataaccagggggtgagaggatgatattacgcttaataccgaagggggtgtacacacccttgtgatattgtgcctaatagccagggggaagaaaattatattaattttaatatttatggggaaaaaggatgatattactcccaatatcacaggggctgtacaccgaccttttgatattgtttttaatatccagaagagaagaggataatattgctcccaatatcagaaaaggtgtaaaccccttctgtgatattggtcctaatatccagggagggagagaataatattactaccaatatcacagaaggtgcccacccccaaggtgatattgctcctaatatccaaagataatagggtgatgttactcccaatatcacaggaggtgttcacaccccttgtgatattgtttctaacgtacagggaagggagaggatgatattattcccaatatcacaggaggtgtatactcctctgtgatattgattttaatattcggggggaaaggatgatattactccctatatcgcagagggtgtacaccctctgtaatattgatcctaatatccagggcgggataggatgatattactcccaatatcgcagaaagtctacacaacccccagtaatattgtttttactatccagggggaagaggatgacattactcccaatttcacagagtgtgtacactcaccatttgatattgtttctaatatctagggggagagaatatattactcccaatatcacaggaattgtacaccacctctgtgacattcttgtgaatatccggggaaaaagagaataatattactcccaatattgcagagcgtgtacacccctccatgatatcgatactaatatttttttaaagaggatgatattactcccattgtcacaggatgtgtacaccccccttgtgaaattgttcataatattctggggggagagcataatattactccccatatcgaaaaaggtgtccaccctccttataatatggttcctaatatccaggatattacttaatccaggatacttgtaataccctaaatatacaattgcttgaacctccacctcccaggttcaagcaattcttctgcctcagcctcccgagtagctgggactacaggggcacaccaccacacccagctaatttttttttcttgtatttttagtagagatggggttttgccatattggccaggctggtctcaaactcctgaccttgtgatctgcccacctcagcctcccaaagtgctgggattataggcgtgacccaccgtgccaagccaggaagaggatgctctatagatttccccaataagagatggctttgcagggccattccaaaatatgtcaaagaaatacatttggggataaaatactttgatttcctttagggaatgttatctattatgtgatgctataccagagtcaggttggagtcggttatcttattgcaacaaagagtctgttccgtcactgttgggatctctattttttcctcttatttcttgagacagggtctcactctgtcacccagtctggagtgcagtggtgcgatcttcattcactgaaacctctgcctcctgtgttcaggtgattctcgtgcctcagccccttaagtaactaggattacaggtgtgcgccaccacacccagctaatttttgtattttcagtagagatggtattttgccctgttggccaggctggtcttgaactcctggcctcgtgtcatctgcccacctcgacctcccaaagtgctgggactgcaaatgtgagctattgtgcccagccaggatctctgttttaatgttagtgctggtcactttgcatgaactccaaagggaagaaatataatgaggtgtgtctgaccccctgccttctcatcgtgacctgaattagtttttcaggtttgcaggggatacccttggacaagaaggggctctattcggttggttggggggattagaattttactttttgtttacaatatttctcctgaaagagttaggggctcacaaggaatttccgcgtgagcaacttatgaggaaagccatctgggaagatatgtgtccttgtgtcactgggatattctcgtttaccccaatgatacggcaatgacgcagggttgtgaaattacagctatgtgtttggggaaaaaagaaagcaggattgtgtgactacgtttccaaacttcacttgcccttagccatagtgagttgggggcctggagattctgttttctttcacaatgatatagatacaattaaatgtatagaaagcaaaaaaataaaaaggtgagtaatgaggaacctctgattcctgagtggccatgtagttacccatggcacagagccacagttactgaaggtaaagtttgctggggaatttagaaatgaatccagctcttggaggagtcagtttactggatgcctaagaaaatgcaaacaaaataagaaaaaagggtaatattcaatcccatagttattgttacctgtcatagctaaagtaaaattaaaacagagtgctggcttcaatcttgatgctacactaagcttagatttcagtgaatgtgagtctcagccactagctcagagccacctcccaaagaccaaatcatgtagggacaatagaaagtacttctgagaattgtggttaccaagaacctagtaactgttggggaggagcaaaacaaagtacagaaaccagagggtacaatctgagtgagactgctatcagcttctggaggagcctttactaaaatgaatgatgagagtaactggatgatgagagtaactaatggatgatgagagtaagcaatgtctttggttttcttttttttttttttttttttttagcagacgtctcactcttgtcgcccaggctggagtgtaatggcatgatctcgcctcactgcaacctccacctcctgggttcaagcaattctcctgtctcagcctcccgagtagctgggactacaggcactcatcaccacacctggctaatttttgtatttttagtattttctggtgagggtccaggtttccggaaacaactcagagacatatgttaagatgttatctttagttttcacagggaaccaaatatgttacgactccaatttccttggctattgttttaagttaccattaccttctcgttgatcaagttgctcatttacttctcaagcctagctagatgcctggaatttcccttgaaggaagtcaagattttcctttatctccatactggctgatggtgatcgagtaagcccctaagaggggtccctgctccatctcgagatgctgctagattctacagtgcctaataaacagctctcgcctggccgacaaagagctgcttgctctctggatagcaattccaaagtgaacagacaacatcctgtttggaagactgccactctgttagaagaagcatcaggaaaacctttcttttgagctatttataactaacagcaattgaccaagtatacttttgtgagtgaaactgacctttctccctgtaagaattctccaaaatttggaaactatttgtgagtatttttacttatggcaatataattattggcacaagctcaatcagattcggttttctttcgtaacaggaaccattggagatactcattactctttgaaggcttacagtggaatgaattcaaatacgacttatttgaggaattgaagttgactttatggagctgataagaatcttcttggagaaaaaaagactgggtatattttcaatatgctttccttttaaggtccctcacctgtggaaagtaaagaatgtcactttctgacaggctcaggaacctcaagttatgtagggatctcaagaagatgggggaattcacccagttcatacaggtgaaattgctgttgcaaagattatgaatatgagagaagtccagcatggctgacttcatctcgtgtctggcctcaggctggctgcccttgctcactcttgggcataggccaagctagccatgggaggaatttagtttatagtttaactttgaagcacggatgataatagtctctccctaaaatgaaccccttccttgctcagggactgaaactacctttgtatgacaaatgaaagcccacaagattaagattatgagaggggcctgaattctgctaaaatgcaggtgtagctgactgataacaagtcattgtcccacagcttgcctttctataatctcttgcttctcaggagtcacatggccagaggtcctgagatttccagtcctgtgacccccacccagagatggacttagtgcatgaggaccattttccacacccctatgatttcatcctcaaacaatcagcagcaaccattccctagccccctgccttccaaattatccataaaaatcctagcctctgagttattagggagattgattaataatcccagtcctaccccttgggttgctctgatttaattaaaccttctctactgcaataccacggactcagtaaattggttttgtctgtgcaatgggcaagaagaacatgttgcatggttatacaggtactacaagcacagtctgatggcaaattattggttttgcttcctgcccttgatgtttctaaacatctagtccaaaattacttgtgaaaggtccagcaaagccaattttaaaagaggctatatggccaatcactattctttctacacattattgcaaataatcaggccacggctgggcacggtggctcatgcctgcaatcccagcactttgggaggctgaggcaggatcacctgaaatcaggagttcaagaccagcctaggcaacatgataaaaccctgtctctactaaaaatacaaaattagccaggcatggtggcatgcacctgtaatcccagctacttgggagactgagggaggagaatcacttgaacctgggaggcagagattgcagtgagctgagatcacaccactgcactccagcctgggcaatagagtgagactttgtctcaaataataataataataatcagaccaagtataatgaaattaaaatttattttgcaaataaattggtcctactacaatttatccttcatagaaatgtggaaactgaagataaaaaaaattaggtttcagaagaaaactatactacacctgttattagattctagccctaaacattgtttttgaggtttttattatttacctgcaatttggtctaaattctgaattatttcctgactacaagtatccaaggaataaatgggttttctttttctttatgatagttttagttggcttctaatgcaacaacaatttttattgtaatcctgtgtgcattctattcctactattcaaattattaatgttatagatctttcattgtagtacttctgaattaaccaaaatcacagtattctgaagatgattctacaaagcctgctgtttctacaaaggctgctgatgatttctacaaagcctgctgtagtgttgctgtggcctctgcttaaaaaagtagaaaacacattgatgcagcatgttcaccccaacctccctgcctaaaggctcagggaccatcttggaagaggaaggcgcgtgagattgtaagagccgaattagggggatggagtgtggagaataaggacacttcatcttggatgctcacctgccaaattgacttctgatgaaagccagctccagaaatgtgcctacagttactactttcacctaaaccctgcccttagtcaaatccttctcttcttctaagcaatcaacttcaattccttgtataacccacagtataaaagggcttttataccattctatcctattgcatgtaagccttgggtctgggaggtaacagtgtgggattccaccatctcatctccctgccacccaaacatgcctgctcttctttaagcaatattaaatgtttgtacttcagaaatttgatttgtcagcctcttcttcagactctcagcttctttggcctttgggagtaaatttgcataggcctgctcaaaacaggatgttctgggggtttgggggtgttgttttgttttgttttttgttttgtttagagacagggtctcactctgtcacccaggttggagtgcagtggtgcaatcatggcacactgcagcctcaaactcctaggctcaagcaatccccccaccttggcctcccaaagttctgggattacaagcataagccaccatgcccagccctggacttttctttaaagacatttacacagtgtaggaattactgtgggtgcactgctcaggtccccttctccaggatgctcattcctacctcatagatgattttcctgcagagatttgacctcagctgaagggcagtcacctggtccaggtggttgctattcacctccttcctgagaacagccaacagccagggacacgctagcacagagatataagagcgaccaaggtgaggccccttctgtgctgcggtgcatgctccagagcctccctgggatcagacttaagagggtctccagccagatctggtcttcgctgctttcctcgagctccccagcgcactcctgcaatgcatcttttttttttttttttttttttttgagacggagtttcactcttgttgcccaggctggaatgcaatggcgcaatctcagctcaccacaacctctgcctcgcgggttcaagtgattctccttcctcagcctcccaagtacctgggattacaggcatgcaccaccacgcccagctaattttgtatttttagtagaaacgggtttctccatgttggtcaggctggtttcgaactcctgacctcagttgatcctcctgcctcagccttccaaagtgctgggattacaggtgtgagccactgtgcctggcccaatgcacctcttgaatcacctcctcatgctttgcttttagagaacatgatccccaacatgtgattccagcaaagattctagaaagccaaccgtgacaatcacttctgggtttagatgacccccccccaccacaagatggcagtgagcacctcatcacagaggtgctgatggtctgcagcaccgcgccaggccagaacgtgccttttacagaagaaaataacccagtagctgactaggatggtgaggagggctggtgagcactgcggtagtgagagggacactagcatcactgagatgcaagtgatggtcatttttcataggtcaaagctcaaagcaggggacagttacagggcagggcttcatagcaccagtgtgatgaaagtatctgggagtggctaaggccagcactatgccatgggaagcaaggtgggcctgaggaggaggcagcagcgtcagcctgcaacaagtgggggctgccctgcagagacctaagagtcatgttatagagcacagtgtctgtaaggccaagaagtgtggacagccaagtgtgtcaattactagacatactcaagaggagcaggaagggcagggcatggtggctcatgcctgtaatcccagctacttgggagactgaggaaggagaatcgcttgaacccgggaggtgaaaattgcaatgagccgagatttcgccactgcactccagcctgtgtgatgggagcgggactccatctcaaaacaaaaaaagaaaaaggaaaaagaaaaaaagaaaaacctaggtatacttctcaagcaaataaaaataatcaaaaccaatatcatgcccgggcacaaatttcatatatataacagatttaaatatatgagggtgattatcctctcatatctccatttttttttgtttttccatttttttctttactaaaaaaagttaatgccaatgacacacaatttttttttttttttttttttttgagatggagtctcacttcttcgccctggctggagtgcaatggcgtgatctcgactcactgcaaagtctgcctcctgggttcaagcaattctcctgcctcagcctcccaagtagctgggaccacaggagtgagccaccacacccagctaatttttgtatttttaatagagacggggtttcaccatattggccaggctggtctcaaactcctgatctcaaataatctgcccgcctcggcctcccaagattctgggattataggcgttgagccactgcgccccgcctatgtatgattttttttttaattttattttcataagtttttggggaacaggtggtattttgttacatgagtaatttctttagttgtgatttgtgagattttggttcacccatcaactgagaagtatacactgaacccaatttgtggtcttttatccctcacccccttcccaccctttcccccggagtccctgaagtccattgtatcattcttatgcctttgcatcttcatagcttagctcttgaacccttactttctgtttgagggagaagacatatcatctacaagtagatactgtgtaaacattccattgcatgactatcccataacttatttattatttgtgtttggttatttgctgctatgtaacaaccccactcccaactaaatggtgtgacaattccatgattctgtggatcaaaaattctgaaaagtcaaacccaaggagttttgtctctgctccatgatgctaaagcctccgcaggggtgaggcgaatggctcagggtgactgaaaagctcagggttggaacagctggggatgaggcctctatgtataagatgattcttcactcacaggtctgaaactatggtggggacagccagaaggctcggctcagctgggacagtcacctgagccctacacatgacctctccaacatggtgatcctgaagcagttgggtttcttacacagcatcacacttttcttttttttttttttttttgagatgaaatattgctctatcacccaggctggagtgcagtggcacgatctcagctcactgcagcctccgcctaccaggttcaagcgattctcctgctccagcctcccaagttgctgggattgcaggcgcctgccaccaagcccagctaatttttgtatttttagtagagacggggtttcaccttgttggccaggctagtcttgacctcttgacctcaggcgatccgcctgcctcggcctcccaaagtgctgggattacaggcatgagccaccgcgcccggccaaagctcacacttcttatgattcagccttagatgtcacatcagttcattttccccacacttattagtgttagaagtcacaagcccacccatactcaggggactggcacacagaccccactctcaatggaaggggtgggacaccaccattcctgctgatgggcatttgggtaacttcctgtttgaagctattaagattgggctgctgtggccgggcgcagtggctcacgcctctaatcccagcactttgggaggccgaggcgggcggatcacgaagtcaggagatcgagaccatcctggctaacacggtgaaaccccgtctttactaaaaataccaaaaaaaaaaaaaattagctgggcatggtagcgggcgcctgtagtcccagctactcgggaggctgaggcaggagaacggcgtgaacccgggaggcggagcttgcagtgagccgagattgtgccactgcactccagcctaggcgacagagcaagactccgtctccaaaaaaaaaaaaaaagattgggctgctgtgactattctagtaggtgtctttggtgagcgcctacacgtgtttctctttttctctttagtatatgcccaggaggggaactgctggctcccagataccgtatgttcagggtcacacacacttccacagggttttccaaagcccttgtaccagcacgcactcccagcacctgtgtgactgctccagctgtcccacagtctcatcagttctattgctgatattttcattttagcttaagttatatttaataggaaaattaccgttgcctctgccccccgttcctgcctgtaggagtttctcgtagctgttgctacaggtggccacaaatctgtcacttaaacccacacaaattgatgtccttatggctttggagtcagaagtgtcaactgaaggtactagcagggctgtactgacctggtggcctcagggagcatctgtgctgcttctccaccttctagaggctgctgcatccctcgctccagccccttcctgacaccactcaccctcctacttctgttatcacatcctcaccttctctgtgttcagggctccctctgtctctctcttgcaagcacacttgggattccattgagggccacccacataacccaggagaatttctccacctcaatatccttaacaactgcagagcccttttgccataaaagttaccattcacgggttccagggattgtgacatgggtagctttaggagtgattattcctgcctgtctcccgctcaccagaacttggactttctctctcaacaggagccccctgtgtgggaatagcctgtctcaacgacgccctctataaggacctgcttcctcaaaggacctcatagtcgggtcctgcccctcagtgtccagtctgccttggctggaggggctgcaggggtgtgttggcgccacctggtggagacagggcatcacagcaggtgggagcccagtagaagcacaaccaaaacatgggtaatgtttaaaattttctggctaagcgctgtggctcacgcctgtaattccagcactttgggaggccgaggtgggtggatcacatgaggacgggagtttgagaccagcctggccaacatggtgaaacatcccctctactaaaaaatacagaaaaattagctggacatgtggcgcgctcctgtaatcccagctactcgagaggctgagacacgagaatcgcttcaaccccggaggggttgccgagatcgcgccactgcactccaggctgggcgatagagcgagactctgtctcaaaaaaaaaaaaagaagaggggaggcgaggggaggggaggggaaaagggggaatttgtttggagctgagacatccatcttctcctgacctcagatatttgcactcctggttatgaagccttcacacttggactgaatacaccaccagctttcccgatttccagcgtgcaaatggcagatcgtgagacttctcagcttccataattacatgagccaatttatatatataaattgggtcctccagaaaaacagaataaattatatatataattatacgcataacttaattaaattatacgtataacttagctatatatataatttattctgtttttctgaagaaccctactgacacaaatgttgagcatcttttcatgtgcttattggcttaataacttgtacatcttctttggggaaatgtctattcaagttctttgcccattttgtaactgaactattaatatttgtctttacattgttgagttgtaaaagttccttatatattctagatactagagccttatcagatatatttctgcaactattttctcctaatatataggttgtgtttttattttctttttctttttttttttattgagacagtctcactctgtcacccaggctggagtgcagtggcatgatcttggctcactgcagactcgacctgccaggctcaagcaattctcccacttcagcctcctgagtagctgaggttataggcacttgccatcgcacccagctaatttttgtattttttagtagagccgaggtttcgccatgttgcctaggttggtcttgaactccctgcctcaaagcgatctgtcagcctcagtctccctaagtgctggaagtacaggtgtgagccacagtgcccggccatctattttcaatagtgttttttgatgtacacaggtttggaattttgataatgttcaattcatccatttttttttttttttttttggttctttctactggaccaccactcttgagccctctaatccaacctccacgcggcagccagagggagctctctaaatgtaattactctttccctgctccacctgctcaaaacagtgtcacatttgtgatttaaaacagtatttctcaaacctaatttgcaaacaaagcaggtggaactcttcttgtatgcacagcatctgatttggttggtctggcatgggtctgggagtgagcacacctaccaagcggctgctggggtaacttgcgttttccactgatgatttcagcaatgtttccggtcccacatgctcctccagaaccttgtactcccccatgaaaaggtggagtccatttccccttcctttatttatttttttgagacgaagtttcactcttgttgcccaggctggagcgcaatggcgtgatctcagctcaccgcaacctccgcctcctgggttcaagcaatgcttctacctcagcctcccgagtagctgggattacaggtatgtgccaccacgcccagctaattttgtatttttagtagagacggggtttctccatgtcggccaggctggtctcaaactcccgacctcaggtgatccgcccgcctcagcctcccaaagtgctgggattacaggcgggagccaccgcgcccggctatttccccttcctttgaacctgatcaggacttgacgatggcatcaacatggtgagagtgaccctgcatggcttatgaggctgggttacacaaggcgatgttgcttctgactggctccctctcaggatacatgcccttggaacccatcctctaagctccttgggagcccaacttagcccatgtggagacaagacagggagagaaacagaggcacccccagccctcagccagcatcaaccgccagacaggagagcaaatgcgccaacaatgattccagctgaagcctcagacagcgtggagcagagatgagggatccctgcagattgcagatgcgtgagcaaaatgcatgctgtcactgttttgaaacaacaatgtctgggggctgtttgttatgcagcaatagacagctgtaacaatgctgttactgctgtattccatgaatgactgcactttgagtagcagggggctagatcactagataagccccatggcttctgtgtatgctatttttctacttttatatccttttcattcactttttttttttttttttttgagacagagtctcactctgttgcccaggtgggagtgcagtggtgcaatcttggcggactgcaacctccacttcccgggttcaagcaattattgtgcctcagcctcctgagtagctgcgactatagatgcacccccatgcctggctagtttccgtatttttagtagagacggggttttgccatgttggccaggctgatctcagactcctgacctcaggtgatccacccaccttggcctcccaaagtgctgggattacaggcgtgaaccactgcacccagcctcattcactttctttacttggctcatttttccttgttgcctcaattctcctctaagatcactttcctgacatttcagcctgggcctgttgccttctctgggtcccctccgcctcctgtgcctcccccatctcagccttgatccctcagattatacttcctctgtccccaccctgaccatcttggctgtccctggatagggatgggtatcttctcccactggtctgggagatctggaaggacaggcctggaaaagacttggtcactgctggaaggagctcagttagtgtggtgctgaggacagtacgggtgaggctggccccttcacccaaactcccactctcttccatagatttcacctctgtggcccaggccataggattagggcaactccccttaaacatcgagtccatcctccaagctgtccttttttttttttttttttttttttttgagacagagtctcgctctgttgcccaggctggagtgcagtggcgcgatctcggctcactgcaagctccacctccagggttcactccattctcctgcctcagcctcccgagtagctgggactacaggagcctgccaccacacccggctaattttttgtatttttagttgagacggggtttcaccgtgttagtcaggatggtctcgatctcctgacctcgtgatccgcccgcctcggcctcccaaagtgctgggattacaggcgtgagccatcgcgcccggcctcatgctgttcttgaatagtgagcacctgttacaagtcgccccaccagcctctcacttgtacccccctcatctctttctccccaagagacagaggaccctggcacttgtgaagcatgacccagaccctggggccatggcatccaacatcctcattccccatgacccctactgtctagatgtagctgccaagagacccccagactccccgggcctctgtctagagtgccaagacagagagagaatgccctgccgcttgcatgctttgtggggtgtccttcccccttccctggctgctaggcgtgacttcaacgttctccccaacccccaaacagcagcactgacaccagctgcagacctggctcaggttagctaatgaggaccaggctggggatggagcctgaacccctaaaccccagtcctgtaccccaccctaatcctggggtctccactggacaaaacgaagcagcttggtttttcgttgttattgtttttgagatagagtatctctctgtctcccaggttggagtgcagtggcgtgatctcagctcactgcagcctccgcctcccgggttcaagtgattcttgtgccgcagcctccccagtagctgggattacaggcgcgtgccaccacacccagctaatttttgtatttttagtagagacagggtttcaccatgttggccaggctggtctgaaactcctgacctcaagtgatttcccagcctcggcctcccaaagtggaagcggcttatttttaaggagaaaactcccgtggaaaggaatcagcacctcctctgtcaacatttcacttctctgaaaagactctcacttccaacagaaagtgctttgtaacacaacaatgaggctgggcgaggtggctcatgcctgtaatcccagcactttgggaagctgaggcgagtggatcacgaggtcagaagttcgagaccagcctgaccaatatggtgaaaccccgtctctactaaaaatacaaaaattagttccgtgtggtggcgtgagcctgtaatcccagctactcaggaggctgaggcaggagaatggcttgaacccaggagatggaggttgcaatgagccgagatcacgccactgcactccagcctgggcaacagagtgagactccgtctcaaaaaaaaaaaaaaaagaatgagaacatatggacacagggaggggaacaatacacacaaacaaaatttagaaacaggtgaaaataattttagtaatatttttactaatactgatatgctcaaaatattattatttcaataagtaatctaaaaattattgagatgtcttatgttcttttcatcatactaagcctttaatatttggtgtgtattttacactcacagcacatctcaatttgcagtccccatgtttcaagcactaaataaccatgtgtgtccggtggctaccatactggacagcgttgatctgaaatcgcatctgtatgcatcaccagcatatttgcagagatccccatctcagcagcacacctgaggctcatctgcgaaagcacctgcaacttctctacaacctcccacatcacctccaaacacatcctcatgtcatctgcaaacacacccatagctcacaggccaatgcctaaatatcattgcaggcaccttcagagaaagcacttactaaaggggtatacttgattccacatctgctttgacctgcaaatctcccttctcctttacatacatttgcatctcatttgtatgtcaatctaaatccactggcagagcctcagatcatcatctcaaagtcaggtggatgtggggctgggcaggcctccaggtgttcctcctcctgcttcctctggggctcttgatcctcctcctcttccttgctgctctcctcctcctcctccaatatggtgaccagttcctcccgcagcgcccccatctccagccccaggctgcacagctgtcccagcagctggacatccactcggcgcaggttcccctgccagtaggaaggggacgtcacagggatgccaccccagagagcaaggggtctctccaggacctgggtgagagcaggtcccaactcatgtcctggccacagcgcctgggcagggtcctcactgtgcccatggaccctaactgccttcctgcttctcagagtgtctcttgatctctaactcttctctttgtctctccatttcattgtccctgacttctctctctctgtctcctccctctcttatctatatctgtccctgtttccctttgtctctgtccccatttattttttgtctttccatgcccctgtctctctgtctttatgtgttgccatttctctgcccctgcctttggctctctttctctcgcttgccctctctctgccctccccaactttctcaaattcagtctgtctctccatctctgttcctgctctccgtctctgcttcccacctctgtccctctcttttgggatctccctgtccccacctctgttcccgtccctcactctatgtctgtctctcggtgtctgtacatgcctctcatgtctctgcttctatctctcagattctgtttttcgatctctggccttctctatttttgttcatttccattcattctcatttcctctctttctctttcccttccaaacccctcactcaccagctcctccctgatccacagcagactatcgcaggcacctccagtgtctgcccctgcagtcctgagggtctgaccagggatttccactggggagacctccctcagggcctgggggggtgggcccagccccggaggcaccagtccagcctgattcagctgcctccacagttccatcgtctctgagctatggctgcaaggagcaggaagtagcaaggtccagggtggcctggtcccctggggagctgtgtgcgtggtggagagtaaagggcagagggagtgggatgggggttcctgggaaaggtatcccaaagtccactcttcagagagaatcagctggccttgtgcttttctttttccttctgaagtctaacctcaactctgctcacagggttcaaacatagcctcttgcagaggtctaactccacccttccctgcctgtctcaggcctgacccctcaggggcgctcagtgtctgtagatgcctggcaccctctgtccttccacctgccccccaccaccacttctccagcctctcctcagcctccatttgacctctggcttgcccatagcttggtccttgcttgtcctcttggcacgggtcatcctagggctttcccaccagtgtgcctttgggggcaggaatggctcccaggggcaccaagacagcaatcccttagctggagtgcctgtgtccaggctgctggcctagggccaagcagccaattctgctgaccctggacttgcctatgggtatattatccctgttgagggtgagggcttctgctgtggaaaagtctgggaagcactgcaggcctctctcggccttggacccttccttcagacccaaggtgcatatatatacatatatataatggtagatcacgaggtcaggagatcaagaccatcctggccacatggtgaaaccccgtctctagtaaaacacaaaaaattagccgggcatgctgccgcgtgcctgtagtcccagctactcgggaggctgaggcaggagaatggtgtgaacccaggaggtggaggttgcagtaagccaagatcacgccactgcattccagcctggcgacagagcaagactccatcttaaaataaacaaatgaacaatatatatatatatgtattttgttttttgagacagagtctcgctctgtcatccaggctggactgcagtggtgcaatcttggctcactgcaacctccgcctcccgggttcaagcgattcccctgcctcagcctcctgaacagctggggttacaggtgcacgccaccacacctggcgaatttttgtatgtttagtggagacggggtttcaccatgttagccaggctggtctcaaacccctgacctcaggtgatctgcccacctcggcctcccaaagtgctgggattacaggcgtgagccaacgcgcccagccccaagtcccttttaccatagaaagtaacatagtcacagtgcccagggattcacaggtatggggagagggttcgttattcagctgccacacccaccttcctaaacctgctgcccttccagtttcctcacgtgcacagccacgcccgtctgcttttagtttctcaatctgttggcttaaccttcaaaacaggcccaggatttgagcacttctcaccattccctctgccccatccccattcatctcttgcctagactgctacagcagcctcttttactggtcccctgcatccacccttgccctctaaggcaagggtccccagtccctgggccaaggaccagtaccagcccctcgcctgctaggaactgggccgcacagcaagagatgagcagcgggtaagtgagcattaccgcctgagctccgcctcctgtcacatcagcagtggcattagattctcataggaggcaaaccctattgtgaactgtgcgtgcgggggatctaggttgcctgctccttatgagaatctaatgcctgatgatctcaggtggaacagtttcatcccaaaaccatccccaccccacccccgacccccagtctatggaaaaattgtcctccacgaaaccagtccctggtaacaaaacggttagggaccgctgctctaaggtacattctccacctggcagaaataatctttacaaaatgtaaatccgattttgacactcccttcttcccactgtgaatagaataaaaccctaccaggcctgcaccgtcagcccctgcccacctctcaacccagtctcctatctctgtctgcaagctggttcccacctcaaggcctctctgctctagaggctacctctccctgcagcgcttttcccctagatctttgaatggctctttccttatcattcacttctacttcaatgtcacctcttcagagaggcctttgctgatggccctacacccagtcacttttttttatctgcttctcatcaaaattgccttgctgattcctttgtttcttattcatcctctcccacatccatcctctcccagcccagaatgttgacttcctgagagagggactgggtctgtcctgctcaccatggtaacctcggcatctagaacagtgcctgccatcacgtggtaggtgctcagtaaatattcttggaactaatgaatgaataattctatccacaagacttcacaatggctcttcatgctgcgatctagctttcaactccaaactggtcttgagatctcacctcagtctctaaccttgacatctaacctcttcacccactctcttacctgaccctaatttttaaaaatgacgtggtcagcttttcagccccctcattccctgtttttaggaggtagtgagtggaagctggaagaataagaaagcttggggagactgcaattgcagtcaggaaagaaaggtactctgccgggaagaacaccccatcttctcctagggaaagattgtggagtcctggggtttgttttgtttttcaattttttgttttaagagacagcgtctcgctctgtcacccaggctggagtgcagtggcgcaatcacagctcactgcaacttcgacctccccggctcaagtgatccccccgcctcagcctcgtgagtagctgggaccacaggcgtgcaccaccacgcccggctaacattttattttttgtggatataaggttgccctatttctttgtggagataaaggctcccctatgttgcccaggctggtctcgaactcctggcttcaagcgatgctttcgcctcggcctccacaaagtgctgggttcacaggtgcgtgagcccgacctgtgtctcgttttgaagctcagggagagggcgctgtgagcaatccctaaaccctttaagagtaaaaagtgcgtgcacctttaagaggacggttagaaaacgcggggcgtggccacaggagaataagttcgcgctgaaccaggagcgtgggataagaccggccccttccggttacgaaaccttagcaagatggcggctccctgggcgtccctgcgcctggtcgcccccatgtggaatgggcgtatcaggggcatccatcgcctgggtgcggcagtggccccagagggcaatcagaagaagaaaaggacaatactccagttcctgaccaactatttctacgatgtggaggctctgagggattacttgctccaaagggagatgtacaaggtgcatgagaaaaatcggtttcgagacaaggagtggatcaggccagataagtatggccatttctctcaggagttctggaatttctgtgaagtgcctgtcgaagctgtggatgccggtgactgtgacatcaactacgagggcctggataacctccgaacctccgcaggctggacatctcggacctccctgccgtgtccaaccctggcctcactcagatattggtggaggagatgctgcccaattgcgaggttgtgggagtcgactgggctgagggcctgaagtcagggccggaggagcagcctcgggacacagccagccctgtccctgcctagcctttagccctgtccccactcacgtggcttctcagcgggctgcatggaatgtctggtagctcaccacacttctggcttccatttgtcttcactcaacgtcagggtgggggagtggtgctggccaatcacaggagagagcgtgagttcccagtatttattcctggctgcccttggctaaaggtcacagctcctgtcaccctgtcaggcagccctttccatgcccctgttcaggcctggggaggtaaaggctcaggctgttagtagccgcagagagccacactcaccttgtcaggagactcttctcaaactgtccttatgtgagtgcactgccatttcttgcagggaccctgactgacacaggggctactactgacactttacagggatggttctcccccgtgcagggccgctgtgcccactgcaggacatgcagcatccttcgccccactccactcactaaaggccagcgcaccccaggccccatagtattgctggttatggatttattgactttatgttccaaattcagctttttcagttggctgttttttgaaaggggataagctttgtcagtagagggcaccgaacaggcattataggaggaaaggcgcctccttcgtggttcttgttggcctccactgaggcacctctctgggaataacgttccccagcaccccaaatggatttccagtcaattcagaagcattttaccagtgaagccctcattattccagttcactgttaaagccagtaattctctatattaaactttccctgttcggtttatactccggagtataaaccgaacaggattatattatctgaagctccccttttgggcggaatgtg

SEQ ID NO: 735339 - DNA, 188056 bp, Homo sapiens
ctccaaggctgagggatgaggagacctgctgaggacccagggccttatctttccatcccactccataggtcccagtattgactgatgctgtcttcacctcctagcctcacttttaaccttctggcacccgcccaccactgtccagttcactattgaagccctgccgtccagtgctgcagagggaaaggatgttcttctactggcctgcaatatttcagaaactattcaagcctattattggcacaaggggaaaacggcagaagggagccctctcattgctggttatataacagacattcaagcaaatatcccaggggccgcatacagtggtcgagagacagtataccccaatggatccctgctgttccaaaacatcaccctggaggacgcaggatcctacaccctacgaaccataaatgccagttacgactctgaccaagcaactggccagctccacgtacaccgtgagtgattcccccatacctctgggtgctggcggtcagttctgcttcacacacatgagattgtcaggcctgggctgtgcctgcatccccctctgcattttgtcccgtgttgagatttgggcatttagtgcaggacacacacatggtaggtaaacttcaacagatcagaattcctttcctgcatccaggccctgcagacactgatggcgggggcgggggggcctcagcagggggaggtcagtctcagccaagcaccccatgccctccccatgaacctgaccctgagaaagaccctggagaactgggtcagggcctggcctgagggcgtcctgggaacctcacaaaagcccagcctcaggactcctgactccgtgtgaccccgggaagcctgtgtcagggctggggtgtggtctcctgggcagggcttactgggagcaaggatttaccagatgtctgcgggctgtggttcctgaagcttctcatcagtgagggctcagctcccagagtctcatctagacaaggacagagcctaccactttccctgggactcagcctggagagggcagggggacaggattactagggcattggccccctgaatgaggagcttaagagatgcccttgggcagtcagtggcccaggggtaggaacagaggggagaaaatgttcctggcagcttcttgtccaccggggatcatgcccaggggtgctctcccatggaggcaaataacagatgctgttgatgtgaacacctcctctgtgccaagcttcatgtcagatcctgtgaataatttaaagttcattcacagacaaagtggcaagcctcagaccattttccatttacatattgtatggaggggaaactgaggcacagagagatacagacaccggccacggtgggcagatcgcagctggcagagtcacatgagggctgtctgcagctgctgccacgtcctctccttcatccctggtgccttactaggtgtctgtggaccttagaacagccactggttcggatgttttcttcttaggtgtctacagctcggagggggagattctggtctggagagttatgagtaaatacagaattaatcagttttttcttaactaaatcacctgcctcaacaatcagtcagtgctggggaagttcaggcctcctcgctcaggtccacaccccgcatctctggacatgaaatggcttcgtgtgttttctgatgtgtgggtatcattccaacaggaggataaaggggaggactttgctttctctccccattcacaccctgcaccagccagggcccagtgtgagacacatactccgtagttctctcatgaaggagggagggaatgaatgaaggaatgatctataacctcttcagagacagagacctggatacaagatcctaggaggttctgggcccaacgtgagacacacactctgtagttctcttatgaaggagggagggattgaatgtaggaatgatctataacctcttcagagacagagatgtggatacaagatcctaggaggttctggccacacctgttttctgtccctctagagcctaagacccatgtctcattcatctggcccgtttctcctaaatctgcccctgggagctgagtctcatctgaccctggggctgcagggctgtgggaaggttttcaggggagggatcaggcttgcgggtagtcccacacgtttgccttacaccctggagctctacctggttctcactatgaatatcccataataatcccccctatcctttctggggagtagaaaaaaagtaaatatttaaaaatatgccagagcatctgttcttcttagcaagttcagatagttattagttagcaggaataaatcgttattttaccagagcctcacctgctgggggtttatgggagcctaactgactgaggggggtgggaaatatccaactccagccccctctagccatcatgtcccacctaaaggagagaaaaaactgagaggcacttgtgacattcacagcccagggcacagactctatccaggaccacagaacccctccctccccccactcaccaccgcatcactgaacgcctgctcacccaagttcctgttgcccagtacatcatgtcctggctttcaacaaaaactacaagacagactagaggcaaaaaaaaaaaaaaaaaaaatgcagttcgaaagacagaacaagcatcagaaccagatgcagatgtggcagggatgtggcagggatgttgaaattatcagaccaggaatttaaaacaactctggggccaggagcggtggctcatgcctgtaatcccagcatttgggaggccgaggcaggcagatcacctgaggtcaggagttcgataccagcctggccaacatggcaaaaccccgtctctactaaaaatacaaaaaattaggcaggcatggtggtgggtgcctgtaatcctagatactcggaaggctgaggcaggagaattgcttgaacctgtgaagcggaggttgcggtgagcctagattgtgccactgcactccagcctgggcaacagagcgagattccatctctaaaacaaacaaacaaaaaacaatactggctaatatgctaaaggctgcaatggaaagcatagacaatgtgcagaacagacggatgctgtgagcagagagatggacaggctaagaaagaataacaacagctactatatctatctatctatctatctatctatctatctatctatctatctatctatatatatgtatatatatgctagagatcaaactcactgtaacacctggatctcagagtggttgtgaggatgtttattaggagattaaagagattaaagcagagttatacacagggcgagagctcaactgatgctatcaactagtattcttatttttttgatgttgttattggcaataaaatcaggaacaatgcagtaaaaatttggttttatcatgtacgagttctgtgaccttccttgacttactgaggtactgtaagtctcagattctaactctgcagatggcggtgatgcccctctccctcaaggtgatgtgaggatgagatgagctgtaggtaggttggtgcccactgtgcctggcacatggaaggcccctgaaaatagtcaatgaacatcatccccgctcatcagcatggagttgacagtgagggctcgctctctgtgacaatcatggaatggaaaagaagaaacaagaggaagactgggcgcagtggctcatgcctgtaatcccagcactttgggaggccgaggcgggcagatcatctgaggtcaggagttcaagaccagcctggacaacatggcgaaatttcatctctactaaaaatataaaaattagcctggcatggtggcacaaacctgtaatcccagctacttgggaggctgaggcaagagaatcgcttgaacttgggagatggaggttgcagtgagccgagattgcgtcagtgcactccagtctgggtgacagagcaagactccatccaaaaaaaaaagaaaaagaaaaaagcaacagagggaagaggtgtgacatgagaggaagaagggatttaaaggtacaggagcagggcgaggtgcaagcacctgtgggagaatgtaggagttggtacatcccagtgtgtcaagtctgagacacagaaaatggtgcaaccgtggagagcaagggagtcagctatgaggacagcccaacagaccacactcaggctctggagcatttccttcctccctgactatgcccctgccctgcaatgccccttatggtttcccttggaacaaacttgggccttgtcccctttgccttcccctttctgcagaaaacaacgtcccaggccttcctgtgggggccgtcgctggcatcgtgactggggtcctggttggggtggctctggtggccgccctggtgtgttttctgcttctctccaggactggaaggtaccgcagcttttccccagcctcctcccacccctaggctgaccccagtcagggaggagggagaccccgccctgtattcagggccaggctttccgcatcctcccaaggaatccttccctctcattccatggctcctcccttgccagctgctgatcctaggctgcctcttcctttatgaatgtggcacagttaaggttgcacccctgagtgctgtcctagttccctaacacagcaaagccacagctgcctggagggaggaagggagggagggagggagggagataagacgggagtgctcagaacctggtaccttctgctgttcattgaatttacccacccagtgaggagggatttgcaggcttgagatccatggtgggggtcctgggcatggtcacgcagtggggagtggcaaagcctggacaggctgggtagggtcagcaccccatcgtgattgatgtccctgaggtgtgagatgggagaacctggacctcaggacctgctgtcctttatgtctcttgccaaggggtggagagagagaggacaaggccattgccccatttcagcatctccaggcctgaaaggagggtctggccatggcagggatactgagttctgggagaatatgatacatgctccttgcctccccatgcccccagctcccccagtgtcctgcacacacagccggccctgctttccctctggggccttgacccttcctctcaggcaaacgcaggtggtctgattccctccctgagtcctcagtccctttcctgggtccctgggtcaatgttctcctcacccggcatctgcctgggggggtccttcctctctggccaggacagacgtgactgcttaaggcctatcctcagctccccgtcctcggccgctcctaccacgaaactgatggagacaggaggccttcactccagtccttgaaaatggagtcccttccttgtcctttattctgcccctaaacctgtgatttctccctgcaccctcatgaataatcctgacctttcctagggccagcatccagcgtgacctcagggagcagccgcccccagcctccacccctggtgagtgtcccttcagcccaggtgtgggagcccctaggcctgccctacggtgtccactcctgccagtcaccccctgggggcctctgaccctttctttggggctgcaaggaggatgtcaggaaacatgacacaggggaccccgactgtcttgttcagactgatctgtgggctctgggtcgtgggtcacctcctcgacctcagctgctcaggtctcccctgggaagaggctccctctccctgattctctgggagctgaggacccctacactctcctgcaggaggggcccaggctctcctcccaccctgctgctcactcctgtctctgtccccaggccatggtccctctcacagatccaccttctcggtaagcctgttccctccccagcccttttctactggggtcccaacagtgcaggctcagggcagggggaccatcaaccccacagcacagcactgacccacctttccccagaacagtcaggtcaaagtgagtgcctccagccaggatccgggcctctctacagggccaggaccacccacgccatgtgctgacccctccccgggaccctctacacctgaggagaaccctggagtccagcaggtgcagaatggacactgggaccatcagtcagaggcccacattaacaagggtgcggggtgggcccagccaggacaggggtcagggtgttgtgtccacactgggaggctgagctcaggggcagagctggtcaatcctgaggggaaatgagtggaagtggaggcagggaagtaagtcctggccgatcagagacaggaaccttccaggctgggcttccgtgaccctccctccctgtcccctgacatctcctctctcccctgcccaggcccctctacccagccccagaacagccactcccatctatgaggtgagtgtgggccatggatgttctggtcccgcaggctccaggggacccaggatctgcccccaccagcacctggctgagctcagattcaggaaaatgcagtgaaaatgagaacaggtggtggtgagcagaggagggaggggcctgggaacagggaccccctgagcacagccaggttcagccccagagaagccctgggtgggcccagagcctgggagatgccagacactgttctgagaaggctacaggggttgaggcctcttctctgtttttacaggaattgctatactctgatgcaaacatttactgccagatcgaccacaaagcagatgtggtctcttaggttcctctgggagctgctcttgtgggttgatggagcgtccccaaagctcccagccctggggacggggaaggacatggagcctgagccagagaaccagctctgagtcctgaggagacacaggcctggggacagggagggatgggagtccctgctgaatatctggagaccctgacaggttgccctgggctctgggtgggccgggacaaaggcctctcatcaccacaggaagcgggggcttgcaaggaaagtgaatgggcctgtggcccacccggggtcaccaggaaaggatctgaataaagaggacccttcctctcattggctctttttctgctcacgggaacttagcagaaactcacctgaaactccgtgtccattctctcccgggtcacacagggaaaatatctccaccttgtctcaaccacagtctctcttccctgggaggcagaaataggggttgggagtcaggctggggtgggccctacacaggaaagggcaagattcacatgagccctgcccagccagccgagcgctcagctgtcctcacactaccccagggaccaaggccatgcacagccccagcctgggtccctctgtgaatgcatgtggggtctcaggagcacagaagatggggccatctgatgtccacaaaaggtgagcaatgcgggagcaaccatgggtggtataggttgcggctgtggcccctacgcagcctccagtgtcctgacccctgctgccctcttcacccaggccctggaggcccagtctatcactgtcctccacaaatgaacttacctgtccccaaatccaggatcctgtgtgcttatacctggccactaggttctcctctgtcccagtggctactgctcaggacatctttatccctggtggggcacagagaggggctgtcagagcaaccaagattaatacagacgcataattcagtccttgagcactacccaggactctggcccctcattgctcatcagttcccactttaccccctggcatggatctcactgagcaagccaactctttacacaggagcatccaggtcagaggtgcaggactcccccatctaaagctcatgcaggctcccatggcgatgggacaacctgtctgctcctctccctggcccacagccctatctcgcctgcagctcctccacacacctgggacagcagttctcagcccttccctgagggcccctggaagggtgatgatctcatataggttcacttgaaccaggtgccaccttcccacaagtgagctggtgcctgcactaaagcacagagccacagttcccaagagtgttctgccactgccacaggtcccaagagtgttctgccactgccacaggttgttcgtcctgagatgagaggtaagaaaacaacccgcaatgggttgttttatatcgggatttgcatcaggatttagctctaaatgacccctgatcccacctgcacacagcgtcagatgagacaaggtgaggcctctttagttttctgttgaggctgtgacaaattaccacaagcttagtgacatagaaacctgaaccaaagtgcccacatggctgtgttctttctagaggctccagggaagagtgcatttcctctccttttccacctcctagaggcctcctgcaaccttggctgtgtcctctttctccatcttcaaagccagcagcacagcatcttgaaactattctgtgccctgcttccatccccacatctccacctcctcccacctccctctctcacttaaaaggaaggagccttgtggttattttggacgcacctgggataaaccacaacaacctccccatctcatgatccttcctttaatctgtaaagtgtcctttaccacgtgacatgtccacagatctggggatgaggatgtacacatctttgagaggcccttgttctgtccatcactcctctcaaggccatcttctcatcatcgttcactacaaactacacatgggcacctggatgggttcatcatgactgtggcgtcagttcctgcattaacatccccagcaccctccagatcctgagagagggagacggagggctctccatgcccctagtacctctccaccttcttcttggtgacatgcttagttgctaagaataacagaaagcggaggtgactgaaagatcacaactcaccggcccttcaatagttcgtggacatcagcaccacggacagtgactcagtgaggctaatttccaggtggcagcagggagcatgcagataggagggaactgcaggaaaagctgcccattctattctatatgagaaagagtgtaagaaagaggaagctattacagggataatgctattcttctctaatccataaattgcgaaacctttgcatgtctggatatcatggtttttagcacatctgctgccactccctgcagggctgattgctgcatccaggatgtggtctcttggggggctcacagcctgctttggcctcatggtgagtctccctgcccctgacactcaggccactgtctctgcctacaacatggtgggaaccttccatgattaacgtctgattctctgtgcctgacctttgaagcacatccatcactcagcctggagcatccgctgagctcagcatcctgctcctccatccccagctgagcccttgaggagatgcttgagaggatctcctgggctcctctgtgagctcctccaggctgagccttgtgcttggtgtcagaggcctttgccatctgcttgttctttccataggcaaataatcctcctcagggacaagtggggcctgaagatctgtctgaatatctatctatctatctatctatctatctatctatctatctatctatcatctatctatatgtatgtatatatgagaatgctttattaggcaaaactgcatactatgaacatgctttaaaatgcaacaggatgagatgtgaagacataaagaacaagtgtgtagtgacacatggctatcagaacacactgaagaatccacaccgcggccgagagcagtggctcacgcctgtagtcccagcacttttggaggctgaggcaggcagatcacttgaggacaggtgttcgagaccagcctgaccaacatggtgaaaccccatctctactaaaaatacaaaaaatttagccgggcctggtggctcatgcctgtagtcctggctgttcgggaggctgaggcaggagaattgcctgaacctgggagacacaagttgcagtgagctgagatcgcaccactgcactccagcctgggagatagagtgaggctccatctaaaaacaaaacaaaacaaaaagaatccacactgcttccccgcttcactttacccagaaaaggaatgttctaggccacttcctcttcagcacacatccccagggaactaaaataggttcacagtcacccccatcttcctcattcccatcacctcttacccacagaggcatctctggtcctacagatccagccctgccttcaagaggcacaggtccaacccatccagtgtccctgctagtcacacacagcactcagggtacaatggagggcttctgtgctttggatgggaacaaaccccacctcacattcccacacctgagaagccaccagggtcctctctgtcctgtcctcacactcaatgtctgtcctgggtcacccttgtcatctctcctggaaataggcatggctcctgacaggtaggattgaggctttgtcttttcaggagtccctcccactctgagcacatgaaactgctcagctccatgcaaccctctctcaccaggggccttgttctctgggtccctgaatacctgggtccatgccatgtacattttaagaaaaatgacagtgactctcaccctgacatcctcacccaaggcacgtgtctgacaagaatcaccaggtgagatacctgtggctccacacacctgaggcttcactgcgcaggggtgtcctcatccctctcctcccacccctagggacagtaagcaccacaggctgccttggaccaccagctccccctcccagacacagcctcagatctatactgacatgctacatggagaggctctgatgaacagcaggtattaggaaatcccaccgaaccaggtgccacttgcggccccactcctcctcatatctgtgactgggacagacacacataacacacctctgttcaccgcccagcccccaaggtcaatcacagtctgcttctcccctagatccactgctccccatgtcttccgtcctcagctgcatcctgggtggcctccttgctgttcttgtaccccagaggcaggttccaacctttgtgatgttgcctgcaatgcccaaactttcccttccccttccccttcccttttcccctcccccttcccctccccttcccctccccacccctatcccttcgtcttcccttgtcttcccttcccttccctataaagccaaacatacccatccacctaccttgtggtcaaagtcatcagcctcctgctccactcagtgttctctgaccctgcatatggaggtggtggcccctcctagaacacccaccactcactgtcagccttgcgtggtaatcacagattttgcaggggttacctgtgttcaggtgtgtcacctgtggaaccagaactcttggaaggactggcagagggagctgcttaggatatctcagggctcctggcatctggtctaccacagggctattaacaacagcacttagggacaaggtggaggatggacggttaagagggtaaatatggatgatgtgtgggcaaagaataggacacaggaacacatgcagtactcaaataattatgccaagaaaggtgaggacatggagatggacattcccatatacttctgatgggactgcagtttagtccctacagcaacattgacctcatcatgtttaacgcgcacacgctctgaccactatcctacttctgaaggcctccctgtgctgtgagctctgagaaggccaagcttgcctgttctgtctctgctaaagccagagaccagccaatagcccagcacagggtacttcataaatacatgttgaaggaatgagctccaggaacagtactccacatggtagagatgtgtgtatgaggatgttcactgcagaaggtcatgtcaatgtgacaagtgacgagcagcctcaaatccagcaacaggggtgtgggtaaaagatcatagtgtagccatgcaatggaaccaatgaaaaaaccacaattagagcaaatccacatgtattaataaaggaggtgccctccatacatgctgcacctaacagaatgttgccaaataagaatgaaaaatgatgatatttgggctgtaaaaactagaagtcagctaaataagaatgcatcgaaagtatttgtgaatgcttacaattttataatgccttggcatccgttttggatggaagttggactttctcataccagaagcagggctcagtcacctttgaaatagtttccagttctccacctccttccagttcctcagtgtgattgatcagatatctgatttatacaactgcctcctggtgacctcctccctatgggacttccggatacagcccgtatgactgccccactgaccccacaccctgcctgctgcagtgaccacctctaattacctggatctcatgtctgcttgcattaaatccaccaattaaaactccctgaggacaatctgtttgaataatattctgtaccctaataaaggccttgacccatgggttccccctctgtcctccccatactgcccctgacctctgtgtgtgtgtgtgggtgtgggtgtatgtgtgtgtgtgtgtgtgtgtcctccagacagggcctgtatcccccaggacctgtaagtaataaatctttattttcatcttatgtctctcgcaatcattggcaagagctctgcatcttaaagatcgcaaatttaagaaattggtgtagtcggcacaatagagtacctcttctgtttagcacaagatatctcggagctgctgaggcttttaacatcctcgccggtgtggctgcctcactggtgaggccgttctgttcagtgcaattcagttgctccactgtgtgctgctgtgttgctgctgtagagtgctgccatgttgttctccccaaattgttaccgagtaggaacctgtaatgtgctcccaaggtggtctaccccatgagaagggggattctccatctagggcaagggctaggtgtgtttctggaatcctaatagggaaggcatccacagagggtgaactccactcctccttagagtgaggagtgacatttcccatttattttccccatggaggtgccatgtattgactttttctttcactgtcccaaggttgagccaaggtgagctatggagaccagggcaagataccatttctgttagcaaagcaaatgggtgacaacgtgtggagaagctgtggttctcctgatggatatagcagagtgccatttagtaaaatcttgtcaggaggctgcccctggttagaccggcagtgtctgtagtcactaaggtggatgcgaattttaggccctgggccatggataatccctgcagacacagccgtggcttcatgtgatggggcaatcccgggctagtggctcccttgtttctgcatttcttgctgtggttgcacaatcaacacctcaggggttgattgggtcaccttggaaagagaaacagctgcctaggaggctggtgcacatggaggccaccctcaattttattctgctaacaagttgtaagattaaaacaacagggggctttgggtaccatcaggaacttgtcaagtaaacatccaaagacagaaagaagaaaaagaaaaagacattaaccgtctagaaatacaagccattttaaagattttgcttaaaagatgcgcttgggctgggagcggtggctcacacctgtaatcccagcactttgggaggccaaggtgggtggatcgactgaggtcaggagttcaagaccagcctgaccaacatggtgaaacctcgcctctactaaaaatacaaaaaattagcagggcatggtggcaggtgcctgtaatcccagctacttgggtggagaatcgcttgaacccgggaggcagagacggcagtgagccaagatcgcaccactgtactccagtctgggcgacagagtgagacttcatctcaaaaaaaaaaaaaaaaaaaaaaaaaagacgggcttgtttcgtcgttgtggagtcatcccagagagaggctactccctagagtcactgaccacctttcctcctccatcttttcctcttatcattctagagacagaaaacaagaatctcagctttaggtggctaacctcaccccccaagaaaagaaactaccactttgattgactacaaatccaagaaaaataaaagagaaactttaaaaagtactgagcaaaccacaggtctagcaaacataatgctagccctaggttacttattcatttacaacaaacccctagatataggaggaaaaaataaaaggtaattaaatatatacacatacaatattttaatataaatatataataaatagttaaattatgtatgtataatatgtaactaaatcaaagtaaaatttcatactttgattctattggaaattcaaaattcatttattaacttatatattaaggaatttatgtaaaaaaagatttttaaaagggcaccaatttgcttttgtgtctctacaacataggatctaatttaactttacatttgctaaatacactaattgacaaatattcatggatttaatcaatactggggctcaaattgtagccacacgtgggaatcccataaatttaaacactctgtccctattatcttgagaagaaaactaaatataaaattgaaaaaaacaggtatgtctcaatttacctgtaactttgcctaaatttcccggagtcatatacccattgctgtaaaacattctctattggacataggtgctctgagacaataaataaaatagaagtgtttttggtacttagacattggcttgacaaaatgggatcccatgaaacctcagttaagatagtgaatacggcccaatgtgagttgaaatggggcctttaaggattaaaacttattacatgaaacctagtaagtaatggggtgattatccatactgcttctccatttcatagcccaattttgacagttgtcaaatctggaaaaaacaaacaaacaaacaaaaaaacccctgggaatctgttgcctcacagagacacaaagtagacatcaaaattgtatatctcagttccagttccaaaatggtggcatagaagcaagctggctttactccttcacacagaaaaccaaaaacaaatatacagcaccaaaattattaccagatatattccagaactcaaatatgaaaatgaaacagttttcagagccacagagaagtgaaaaaaactcccgacagatgacaaaagaatcagatttccccatctgtaatgtccctccctgccccattctgcctggtaccaggtgtgtggaaaattttaccccaactcatggtttctacactgggaaatgtaagatcaatgcgggcaaccagtttctgcacaatcctgggttccctgtccctgccttaacccacaagaagcattgtgagtgcccgaagggagaaatttccctgaggacagtcaaagagtggggaggcaggactaccatctccttccctggaaactctgctgtgtaactcagccaagggagacatgaaatcagactggtgtttcagcagctccatgttgtagtaggtttgtttcacaggtatcctgggcatggacatctagccagctttcccacactgccaggatatcccctttgggacctccctcagttaggaagggcacactctgatcatttactagggccaaggtaaaccctaaaggtaacttagagatgaaaaggaggtagtgacctagcagtaaagaactctaagaaaatctatccaataaaaatcaaaacaagccagacaaagactaaaataaataatgaatccttcaatgtaaagacctggacttacatccacaagaaacagtaagcaggtaaccatgatctccccacatggacaaagtgaggaacaagtgactgatcctgatgagatggtgatgtgtgagctctctaatcaagaattcaaaactgcagttttaaggaaactcaatgatcttcaagaaaacatggaaaagcagttcagaaatttatcagagaaatttaacgaagggattgaaataatttaaagaaaacaaacaggaatcttggaattgagaaatatatttgctgaacaggaaaatttattagagtctctcaacagcagaatggatcagaggaaagaatcaacccaaataagactcccccaaggcataaaataatcgaattctcaaaagtcaagggcaaagagaagattttaaaacagaaagagaaaagaagcaaatggcataaagaagctccaattctgtggcaacagattttcagtggaaatcatacagaccaggagggagtgacatgacattctcaaaatgctgaaaaaatattgacatttgagaatactttatccagtgaagttatccttcaatataaaggagagagaaagtttcctagacaaacaaaagctgagataattcacaccatcagactagtcttcctgtaaatactaaagggtaaatactaaatacttcaatgtgaaagtaaaaaaaaaaacactaacatgcaaaacaaccacaacaacaataacaacatttgaaggtataaaatccactggtgaaattaagtacgtagacaaacccagaatactcaaatagtaattgtggaaagtaatccaatcataactctagcatgagtctcaaaatataaatctatcaaaaacaataatacattttaggaggccaaggttggcagattccttgaggtcaagagttcaagaccagcctggtcaaaatggtgaaaccccatctctaccaaaaaatacaaaaatttgcagggtatggtagcacatgcctgtcgtttcagctatttgggaggctgaggcaggagaattgcttgaacccaggaggtggaggttgcagtgagctgagattgcactactgcactccagcctgggtgacagagggagactctgtcttaaaaaaaaatagctacctgtttggagaaaggtaatataaaatatgtaaatagagacaaagtcaaaatttgcaaaggatgaaattaaagagtagagtttttttggggggttttctgtttctattattttatttgtgatctaagataagttgttaccttttcttctcttgaagatactttgttatatctatgtttttggaagtcttatggtaactgcaacgcaaaaaatctatgatagatccactgaaaataaaaaacaatgacttaaaacatactaccagagacaatcaaccacaaggaagacagtaaaaaatgaagaaaggaagaggggagttacaaaacaaccagaaaacaggcaacaaagtggcagtagtaagttcttacttaaaaatattgaacactgaatataaatggactctattctccaattaaaaggcatagagtggctgaatgctgcctatatgctgcctacaagaaaccacttcatgtaaaaagatacaaatagactgaaagtgaagggggtggaaaaagatatttcatgcaagtggaaaccaaaagagagcaggagtagctatactgatatgagataaactacaaatcaaagactataaaaagagacaaagaaagtcactatgtaatgataaagcgctcagttcagcaagaggagatgccaattataaatatctatgcatccaacacttgagctcccaagtctcccaagtatttaaagcaaacaatagtggatctaaaaggagagatagactgaatacaatattaattaggggactttaacaccctgctctcagcaatggccagatctttcagacagaaaatcaacaaggaaacttcaaagttaaactacacactagatcaaataggcctaactggcatttacgggacatttcactaactatctaactgttacagaattcacattattttcatcagcacatagaacattcttcagaacagaccacatcttaagtcccaaaaccagtcagaataaattcaaaaaagtttatatcacatcaagcatttgttctgaccacaatggaataaaactacaataaatgaataactttctggacacatacaacctaccaagatggaagcatgaaaaggcagaaaaacccaacaaaccaacatgaaactgtaacaaaaggaaaacccaggaccgaatgacttcactgctgaattctaccaaacatttaataagaactaaaaccaattctactcaaaatgctttaaaaaattgaagaggatggaacactttcaaactcattctacaaggtcagcattatcctgataccaaaaccagacaaggacaggacaaaaacaaacaaacaaacaaacaaacaaacaaacaaaaaaacactacaggattgcttgaggccaggagtttgagatcagcctgggcaacatagtcagaaccaatctcttaaaaaaaaaaaaaaagaaaaaaattagccaggcatggtggcatgtgcctttagtcctagctactcgggaggctgaggtgagaggaccaattgagcccaggaggttgaggccgcagtgagccatgtttgtgtcactgtactccagcctggggaacagagcaagatgctctctcaaaaacaaaaagcaagctgggtgtggtggctcctgcctgtaatcacagcactttggaaggctgaggtgggagaactgcttaagcccaggagttcaagaccagtctggacaacatagggggactccatctctcaaaaacaaccaaccaaaacaaagccaaaaaagaacataggccaacatcactaacaaacatagatgtaaaagtcctcaataaaatattaacaaaccatgtttagaaacacatcaaaagagatcattcactatgattaagtgagattcatcccagggatgccagtatggctcaacatatgcaaatcaataaatgtgatccatcacattaaagagaaccaagaacaaaaaccatataatcactccagcaagtgcagaaaaggcatttaataaaagaatgggttgagggagtggagcccatagtcagagcagcagtggtctgggattttggaagtagaaagaagggcagcaccactggccaggaccaccagggaacacccccataggccctgggtgttgtgctccagggagggttccctctggagttattaatcttggtgtccactttgcccagctgcccctcacagggtcagggaggatgaagggaaagcttccttctaatgaaagttcagggactcacagttcctagagcctgtagggagaggaagatcttcgaggaagagcacctgggcattggggcgtttgagaggaagatctatgccaggtccaagtggacaacctgtggactctctctccagggacatacgggtatctgggaatctcctgtagcttaaagaggtaaagacctctccctttagcctgaggactggaggatgctggttcaggtgaatgagtcctgcaggggctggtacaggcctggagggtggtggtgtccagggccttgggttcacccttagcatgattcaggccgggcggtgtttcacatgagcaagagggcctgggttcattgcttcaggacaatggtgaaatctcatggtggaagaaatcttgtccttgccagtgcccagctttcatttggtcttggcccagagtgtcctccctagagaagactcttgtcccttcttcacactgcccttcagggatatgccagccttatgggataagatggggtggagactgtagatgtgggtgggaatctctccacagagtgctccttctctcagcggttgcaccttgtctcagggcttcagcttgaaatctgggatctccaagcccttccctccccagtcctggccaggaccacatgggcagatgcattgtgtgaagtgcatttcatttggggtgtcctctctgcatggcaccctcccgttgattctctttgcgcatgtcagagtgcaggcaccatccacacctcctgctggaggagggacggagctgttgactcctgagagctgatcatgtgttcccaccctcacacacaatcatggtccatcctctgagggacatgtgttgccaccactgtggagatggtgcaactgacagtaacaaacagtaaaatctggtactgaatgggaccttaagccaacaatgacaatgtcattccaaggtgtttcatttttattgattcaatgcaagtcacctgatttcattgactattcacaatagctcgataaagtaaatgcatcatcaccaccactttaaagaggaaaaaggtgcttgggcagtttgtgactactgtggtggctgctgcattgctctctggtaaagccaagtaggtggtgggtgcggcctctgggctgggatgatccaccctcctggtggtggcaggggagccaagctggagccatggcctgtgcagtggtagcagctgaactgaccgctgctgcaggatttgcaagctgttacattttgcgaagccatgaagcacataaaacctcaagtagaacaagtgtttcaaagtctaccaaaatctgccttcagagattattactacagaggtggatatgaacccaaaatgacaaaacgggaagcagcattaatactagataatgaatgaacactagtaatagtagggtaagccctactgccaataaagaaaaaaataagagatgctcattaacatgttatgctcttaaatcacgcagacaaaagagggtctccttatatagtagccacaatcaatgaagctaaagatttactgcaagatcaagctaaaaacagtaggtgtataatgaatttttaacttcatattagtttatgtatatgaatatcaagtttttataataaaatgcctccaaacaaagaatatttgatttagggtttaataacttctaagaggggactcagatgtttcctgtttcacagtcagtctgagagggtcatttttcctggagctgacctgggtggaggcctcacactgatactccccagcatcctctctcctgatggggtttatgctgagcatacagtggccctgggacagctccattctctccatgagtcacagacgctggtcatggaagatccactggataaggttccagagtcatctgtggggcaggtcaggatcacaacatccttttcttctgtgactctggtgttgctgactcagatggggtcggagccactgaccctgtggacaatcagtggaggtgctcaactgaaagtgggctgagggcacgtcttctcctccatccctgggtccttaaggtaactgtggaccccagaccaactgacacaggagctagaaagaaattatttaggaagttagtgagggtaagagcgtccttggcaaggtttcccctttaacaaaaagcagcccaagataattccttttctaacaaagagcagcctgaaaaattgagctacagatgtagatgagcaagatggaagcttgcacaggtgaattccagtaggtgtgccaatagaaaagggctgcctggaagccaggtatgttcaacatggagactccatcctcccttttctccattaccacatgtacagtaaaaaaccaggcaacatggcaccggccaggtagacaatccatctgcatgacaaaagatcagagtggggcagccagcaaatggcacagctggtctaaacaatctttcaccccctgtataaatcagacactgcctcctgaagctcatctataaaaccttctgcatttcactatggaagtggcaacccattttccccaggacccctctctctgtgcagagagctcttctctttctttcccctatgaaacttccactcttaacttcactctgggtgcctgcatcctagttttccatggccatgggacaatgaacctcgagtattaccccagatgaatgatgctgtttcacaatcactggttcagctcccttcttcttagggtttcacagctcggtggggagaataccacgcctcagtggtctggggagtgaggaacaaatgaagaattaatcagattttacttagaacgctatcacctgcctcaaccatcagatccatgttgggaatgtccaggcctcctctcttagatctatacccacttcactggacctgaaatcctgtgtttcccgatgtgttggtgtcactcctatgagaggataaaggagagaactttgctttctctccccactcacaccctgcacaagacagggcccaatatgagacacacactcgctcagtagttctctcatgaaggagggagggagtgacctcgagtgattctgccatctgtagtctgtgtaccctggccagtggctgtatcttcatatgcctcagtttcccctcagtaaaataggacacacaatgagaactaaaaataaaattctaattccccagtgaactgaaaggatggcctcttggccaagcggatcccagagttcctgatcatgacaggatgggaggttacacctcattacagcccctccctttggaagtttagaggtgacaactgactagcattaacgctaaaatcgagatcatgagactgacagaacagactctctgtggccataagataccaaattataaactcaacctaaggtcatgcaggcaagggctaagccacactttcctacatttaaagaataagctatgttctaacacagaattttctttctctctagcggctaaagtaacactagccttcgagataagcaatattgaaatgatcgcggctcatccaccaacactggctaactgacccctgttccaacagccacaactacacttcaattggacaggagactgatttcagtaactttctcctaataagagaccactgagcatggcctggttctgctggtatacagacacggtgcactgagtaccataatgcttgtttcatcttttgatgtataagacctaatttaatacatttaaatctgaattctccaccccaaagtgaacatggggtgcatgtagcatgcatgtttgttgatcacgcatgtgcgtgtacttcctttgtgagtatccatagctccacctataacctgttgaatatgtatacctggccaactcattcagcataaatctatcttccacattcccctcccttgaagtgcctgctattggtctctgctggaggctgcatcttctaccctggggaatggccagcctgcaggctgtaaccctgtgtaagaaataacctggttgggtgcagtggctcacacctgtaatcccagtggtttgggaggttgaagtggtagaatagtttgagctcaggagccagagactagcctgggcagcatagcaagatcctgtctcttaaaaaaattttagggaggagagtgaggatcagaaaaaatacctattggctattatgcttagtacttggatcatgaaataatctgtataccaaacccctgattacatatataacaaacctgcatgcgtatctttgaacctaagataaaagtttgttttaaaaactatctgggtgcagtggtgcatgcctatagttccagctactcgagactgaggtgtgaggagtgcttgagctcgggggattgaggctgcagtgaattatggtcccacctgtgagtagccacttcactcaaacctgggagacagagcaagaaccggtctctaaaaaaaaataaaaatagaaaaataaaatgaaaaatatatgaaataaagtctcctttccaaacgtacagatctccgatttttctgccaacaatgataaatggtcagtggcttgccatgttgtctgtgaattacttttaaaatattcacgatcacctgacctaaaggttggtaccaaggaaccgcctgaatacaccgtctctgattatttgcctccaacagagtgttccctgggcctgatctctggtggacaatgagctgctgggaacatcctctcttctctattcctcccctggggatgctgaccttcccttggagtctcctaagttccccagggcagtcggctaatgtcctagggagcttacctgtcttctccataccaagtctcatgtgaaggacgaggctttgcccttgcccagatgaggctctgggggctgagccctggctggctaccagctgcaagagccatggcccttggacagctggtaaatccttgttcccagtcagccctgcccaagatgcctcaacccagccccggcacaggcttcccagggtcacatggagtcaggatcctgggacaggggactggacaggggtttccagggctgagtttctgaacaggggcttcccaggggtcccctcactccaggatctgacatggtcctacaaggaacgtccatggggaggggacccaggagggggaactgacactgacctccccttactgagcctccccccaaccccatcagactgtccttcctctgtagcaagtgcctgcagggtctggatgcaggaaagaaattctgatctgtggaagtttgtctcccctgtgtgtgtcttgcactaaatgtccaaacccccaaatgggatgtaatgtagagggggacacaggcacagcccaggcctgaaaatcctgtgtgtgtgaagcagaactgacccccaacacccagagctcatgagacatcactgtgtacgtgaaactggccagttacttcttcattcacaagatctgtttttatgacttgtagggtgtaggatcctgtgtcattgttggtgacattctgtatcagcagacatgtattggggtatattgtctctcagcctctgtggcaggtcctggggtaattacttgagttcctagtacatatcctgtaattcccctttgtaccagttgtagccaagcctaaggcagattgtgggtgagtggaagaatctccttgccttctgcagcttcaacagtgacttgggcagtggtaggcaagttccagaaagttaaaagtgaggctaggagtggggagagagcatcagttaatactgggccctatgcattgaggtggaaagatggggccctaggtcctggacaggtctcttcatccctcagccttggagtgtgtgtgtgtgtgtgtgtgtgtgtgtgtgtgtgtgtgtgcgcgcgcgcgcgtgcgtgcgtgtcctactgggccaaggtcagcagcatgacctcccttccttcagtgcctctgaccttggcatttccctgtttggagtccttttccccaggggtctgcctggctccctccctactgccttcaggtcctgctcacattagggcatccttgggagaccccttccctgacacctctagagaccctgggtcttccctttctgacctttcgctgctgtgttccctccagggctcttgtcaatacttgacctcacattctagatacccttgcatgtctgtcttcctccctatgagagcatgagctctgtgagaacagggacttgtgtgatcttggttgcaccccagtgcctgggacaggctgcggactcctgtggatgagctcatgagtgttcccagggcccttcacaacgtgggatttattttccaatggctgaggttgttggctaagagctctgttggagttcaatcaggctggtgggaaaaatattagagatagttatagagatagacacaaatcttcttggaagaccaaaaagtttgcataactttggtaatagatctgactgaaggtggtccctttacctttagttaaacaaattaaagtagtaacaaaggaaggcagagtagtttgtctagccagcttgtttactcatgtgatcttaagactaaccattgatgtgccacaggtgcttaattgctttctacttgggaagtccacaatgtcaattaccctctaacggtgttgactcaagcctttgttaattaatcttactgaataaatatgagtctcactagctgatcaaggccatggtcacaactgtttataggactcagcagggagtctgtaagcggccctgacagactcagctggactggcaaagcaaaatatgtgtgtgtcagtgtacactattcacccgtcccccacagctggtgcccctatatgaggagtgctgccacagagctctgtttagtgtcccttgttttttttcttgagtattaccccaacttaaattgtgattattgtcatctgttttcaacattaactgctcagtgatgattcacttggaaaacattaacaatcgagattgtttcttcactaacaacctcagattatttagattttcctgttgtaatcccttcttcctgtttagtgtccaacagaagccctctgtccctctcaggtccccgttctctccaagaaaccccagccagtctctgtgctccctcctcccatccactcccagggagccctcccctcacctgtgagcagaagcgcctgccagggatgtgcactctgtgaggaggggctgagggaggccccatgggctctgctgtctgctttgtcctcctctgtggagaggagcttgggcttcagaaaataaggaggccagaaagtaaggaacaggctgagaaataatggggatgtgtcgaaaggtcacagatgccaacatctttgtcctatgcaatattatccataaaattacaggtttgagatatgcttaaattttcttctaacatgcattaaaataaacatataacttttaatagttatattaaattgtatttaatataaattaaatgctcttgtcagagctactgtgactgtcagctctgctgtccttcctctctctgtgctaagcctcctcccagggcagaagcacttcccagggccaggggtgggggcggggaaaggtaagtggcaatgaggatctgcacaggtagcctttccgcctcctcccctctcagtcctgcctccttgtcttcttttcctctttttctccaatctacatttcagttccttagaccacgctgtgagaagcaaggcttattgggacccccatcccttaacaggatgacctgtgctccccataagtgacctctgctgtgtctagggattggctctgtcagcacctcacagagagtccctggggcccccaaactcagtgttattttctctatgacacagaaacccctctgggtatgcaaggttttcctcatgttttctaatgtctgggaaggttggatttactcccagcagggaggtcacagagatgtccagggagtggggtcctagaaatggacaaatctagagctaaagcccaggtctacgattttcagttgtttttttctgcagtgctatgtgaccctaatttcctaggagtaactaaaatgcaaacctcagacatttgtagacattttatgatttttctctacagcttgtaccactgttattattatttgctttatgctttttcctaaataaatttactttacaaaacatccttgtcctagtagggtgcaggggctcacgtctgtgatctcagctgcttgagaggttgaggtgggtggattgcttgaggacgggaatttgagacaaaacatctttgtcctatgcaatattatccataaaattacaggtttgagatatgcttaaattttcttctaacatgtattaaaataaacatataacttttaatcatcatattaaattgtatttaatataaatttatatacaatacatttttatataataaattatatatataaatgtatatataatagtttttcttttttgagatggagtctggctctgtctcccaggctggagtgcagtggcacgatctcagctcactgcagcctccgccttctgggttcaaacgattctcctacctcagcctcccgagtagctgggattacaggcgcctgccgccacgcccagctaatttttgtacttttttagtagagatggggtttcgccatgttggccaggctggtctcaaacacctgacttcaggtgatatgccgcctcggcctcccaaagtgctgggattacaggcatgagccaccatgcctggcctatatattttatataattatataaagttttctataataaattttatataataatatataaaatggatatttatttaagataaagttattagttttatatatttacatatatttaggaataaatgtgttactgtgggagcccagtgcccaggcaggtagtcagtacatgatggttgtcattagggttaatactttggaattctggattttttcccaagagagtgtctacgctggaatattgggcttgtggctttctgctgatgtgcatgtgtgaagaagctacttccacttattaggacttgtgtatctgtctcgcagtttcactacctattttctcgtgatgttggtcaagtcgcctaacttttctgtgcctcatttacctaatttgtagaatatgggtaacagtacacaagtgtgagtgtgtatttcccaggactgaccactagagggcgtgaaggcaccggcacttactattacagcaatgggtgtagtagtgctcatggtcgtaaacatcattctcccatgaaaggaaccagggcttcctgggagaaataactgattccagggctggggccggaaagcacaagcggagcctggagcatctcgtgaggccagaaagtaaggagccggctgaaaaataatggagatctgtcgaaaggtcacagatgccaaccagaaggagctttgaatgaccaattttgagacaaaatgagcactataagaaataatgatagtaataaattccaacccataaatacccatgagttcctactaatataaataaataattgaatacataaatatataaggatgaagaaacagctttttcttacagcagaattccaattaatgaatgtagaaggaatgatcaaatagaaaatcactatttggctaacagcacagtcaattgtttgtaggcaagaattatcaatggactttaaatatgaatgggtaaaagtatgatgatgctacaactagtgagtaccaagggggaaaaaaaagtacgttgagaagaaacaggctacttccatattcccaaagtatcacttcaggagctacttattgattataatgggacaaatagtaacttacagtagagaaacctggcaacagagtctctccgaggtacaaaggctctcttcaggaaggaggtaaggggaaggaagaagaaaacactgtcctgcctcaattatttgctttccccattctcaagtgtacttcatagacattcaaagatatgtgttgatagtgtccacgatccacatggctctattatagtcatttattcacacatacattcagtgaggctttgagtgcctaatgtgtgcctgatatttgctagatggtggatgctgagaagatcaggtgtgctgctgtctctagggtgactgaatccacctgccccactttacagatgtggaaattaaagtgaaaaggatttataggattagttcactgtcacaaggtcactagccttaaagttacaggagtaaagcaagtttcctgacttgctagattttctgctgcaggtgctgacaatggtgagctccaataggagagaggacactcagagtgaagtgggagccctgaacaccctggattagccaagaggacatgccgggtccagctgtgaccgcacaaaggaccattggggatatttgtattctctttttcacttagagcttgaaatgaggaaaactaagtgcagaaaaccaagagtggaagatttttcacaaagcactggtaacatgcatcagaaaaccctgtgctgatgtctgtcacggtgtttctcactgaacggtaatagtctggctttgagtgtgttccctctacagcctggagttctgcgaggcagggaccaggtgtgattcatctttgtctctccagtgacagtacacagcaggctctgataaatatttcttacaaaataaaatggaataaaaagtagacatctgcacaggtgtgggatgactgagcagcagcagaagcaggaaaagtcagcgtccccagatcagctgatgtggtgttcggattctagataggggtgaggtgccaggatggggatgggggtcctgtggctctgctgccctgggggacacccctaggtttcacagtgcctgctgtggttgctgcactttgcttccccatgggaaagtgatcagagggtgtggggcttcaggtgaccccatgtgggaaatggccaagggaaggtggggtgggcggcacatggttttttttaaccaatatttgaaggtaggttgtatgaaaaggtgttaggcttatttcagcttatggggagtaggacagggattggtgagtgtgtatcaggtatattttggctcaggatggaaaagaactgtcacagtaacataaggtcttttgggaaattacatgtttactggcagagttcaggccagggctgggtgtctgaaaatacctgtcagggtcacttttatggttacaagggcagagcttggcttggaaccaggtttcttactaataccacatattaagtattataaaaactgtcctttgcaataggacattgctctatgatgcaggttgaggtccctctgtttaagtaattgtgggtggctgtgattctctcatctagtctgcgacttggacttcacctccatctgcagtccctctcctttgctgttgacactggtcagagttaagcgcatttactgacgatggtcacagggtggcagcactgcctctctggtattttctaaaacctcttcctggaactgagccagtctaagaggatgtcatgactaagaaaagggcactaatgaggtgaacagataattttttttttcttgtttctcctgtgaagtaacagagtggaggtgagcatggaataattgccttttagaaatggaagacaatggagagaagtgtttcgcaaaccttaatgtgttcacagatcccacacagatctttttattcaatacagattctgatttttctggtgaggcctgagattgtgcatgtctaaggagcttttggatgatgccattgctgctggttggcggaccacactttgagtagcaaggctcgaagatcatttagaggttaattctcactgcatctaatttatggatgaaaacaaaccaaggtccagagagagcatatacagcttgcctaacaaagccattccctaagtgcctgacttcttgcatttaaacccagggcttcagcctttgtccagttctcactccacacatcacacggtttgttcactgttgtgaacgacagttgtggcagcatctctttagtttaggaatccagagccccaatttcactaccctctttggtcttggctcatgctgtgacttcgaatagttttgcccttacttaaaatcttcagtggctcttttgtaatcacaagatcaagttcgaatatctctgtctagtgttcatggctttataacatatggtatctctttagtaaccttacctaacttccctgttttaaaattgtctcttgctgccatagccctccttgctccttcctgctccctaacaaactgtgttcacttctctctcagtggtagtgatgatggcatggcctctgatgttagactcatgtaacttctaatcccagatccaccaccaacattggcaagttgattcatctttctgaggataagcatcctcctctgaaataaacttagatggcggttgagaggggtaaataaaataacacacaaacccactctcatccctgagaccctcttcaaaactagcatataaaaatagctatttgaagaggttcagtgaaattcaaggtaacacagagaaggaattcagaatcctatcagataaatttaatagactgaaataatttttaaaaatcaggcagaaattctgtagctgaaaaattcaattgacaaaccgaagaatgcactaaatctttcaacagcagaattgatcaagcagaagaaagaatttgtgagcttgaagagataatatatgaaaactcagagtcagagagacaaaagaaaaaagaattaaaagaataatgcatgcctacaaggtttgattattaagctactcaaagagatacaagagaagggtgaaaaccaacataaagaaatgtaaaaaacaatcagaatataaatgaaaaattttctaaaatgctagctagtttttttttgagacaggctcttactctcatcacccatgctggagtgaagtggcacagtcatggctcactgcaggctcaacttcctgggctcagatgattctcccacattagccttccaagtagctaggactaaaggcgtgtgccaccaggccaggctaattttttgtatttttagtagagatggggttttgccatcttacccagggctggtcttgaactcctgggctcaagtgatccaggagattcactgccaaaaaggatataaccaagtcatatagtcataggttatctaaagtcaatgtgaaggcaagaattctaagagcagtgagacaaaagcatcaattaacttataaaggaaaacctatcagtctaacaccagatttctcatcagaaaccttacaaaccagaaggtattggggtcctaatcttttggcttcttaaacagaatagctctcagccaagaatcttgtgtagagtgaaattatatttcaaaatgaaagagagaaatacagtctttttcaggcaagcaaatgcttcaggatttgtcacggctagaccatcctacatggaatgttaaagggacttctaaatcacaaaacaaaagatttaaatagaacagaatagaacctcttgaaaccaaaaaattcaaatggcctataaaacaataacacaataagaaaacaaagtagataacgatcaacatgatgactggaacaaatattaacattgaatgtaaatgacctaacactccacttaaaagacacagattggcaagataaataaaaaatcacaaaccaaatatcagctgtcttcaagagactcacttaacatgtaaggattcttatagactcaaggtaaagagatgataaaagatattccatgcaaatggaaaccataagtgagaaggaatagctatccttatatcatataaaacagactttaagcaacaacagtaagaaaaagacaaataaggcaactatataatgataaaaggatcaatcaaacaagaagatattacaatcctaaatatatatgcacctaactttggagctcccacattcataaaacggttatgatgagacctaagaaaaaagatcaacacaaaacagtgagggtgtcctgggttttctttttattggacagcagtgtactagcctatcactttcccagtcaggggatttttggtctccccattcccctaccatgggttcatgccaaagtccatattttttattagtgtttggaattggattttttttttttgaggtggagtctcgctctgttgcctaggctggagtgtagtggcacgatctcggctcactaacctctgcctcctgggttcaagcaattcttctgcctcagcctcctgagtacctgggactacaggtgcatgccaccacacccagctaatttttgtatttttagtagaaacgagatttcaccatattgtccaggcttgtatagaactcctgacctcatgtgacagggaaacaggcactcagtgaacttcatgcgattgaggagttaatgataatgagagaagggctgtgaggggacagcactggggacaccagagcctgtgacgggctgagttgctgtgccttgggagatgcccttttgactgagccctgggaaggagggggtgtgggggcaggagctgcctgcagagggagtggcctcaggtgggcggccacctggctgcagggaagaggtgacagagttcgtgtgcagagcttggagggtgaggaggaggtgggttgaggtgaccttggtgagggtgaaccatggggggctgtgggccctgctgagggaggccagccagccctggacctacagggtggtttggtcttttttgtcccattcccagcatccactgagtggtgaaactctgcaggccagggaccatcccactggccagaaggagcgcacagtaggtgcccactcagtgcatgttgggctggacagaacctcactctgccccctgcccccagctttgggagctgcagcaaggtccctccccctagggatctccatgcctctgtctctgaggggtgagatggggagacttcaaagggccatctcagagtgtgggggatagagacgcagaagtgtgggggatagagggaggcctgggctctagacccaaaggaccttacacacctcctgagtcttttcaaatggtttcttctgttactttaaaaatgatgtaagtcatcatatttattgtaaatcccaggaatctaatcatgcgtaaaataaggtgtcttatccttgaccccaccccttccccaattaaatttccaggatgttaccactgtttgcagttggtgtgaatctctctttaataatactctgtttatctcacttgtcgttttacgccaaaatacccattgaattatattattgctgaagaccattcttttttttttttttttttttgagatggattcttgctctgttgcccaggctggagtgcaatggtgtgatctcggctcactgcaacctctgcctcctgggttcaagtgattctcctgcctcagcctcctgagtttctgggattacaggtgcacaccaccacacctggctaatttttgtatttttagtaaagacagggtttcaccatgttggtcaggctggtctcgaactcctgacctcatgatccaccctccttggcctcccaaaatgctgggattacaggcatgagccaccacacctgcccagaccattctgttctactgaatcatgtgtggtgggcacctcttatatcaatacatatggattttatcttgtgtttgttattggctcccctttttctcattgcatggctacactcaatgctttgtccacacccctgttcctgggttggaatcttgtgacagaaaatgaagtaacaaaggctaaagctttctaaagtggagtcaggagattgcaagacaattgcactttcaccagcaagagctcaaaccacagaatgttccaatagatttggataaacagctgaagtcagtattcaccagccttcaacatctcaactaggagaaccctaaaattaactaagcacatagaatggaatggacttgtgatttaggattccttctcagccaatgagctgcttctgaaaacaactttttgtggaaattacctgtaaagaaaaccctctcctgtgcttgtcttacagaacactagtcagggctgccctgattcagtggacccgaattgctattatttgtttcctaaacatatggtattttctgtgaccttcatctcaatcttttttttaagttactgggctgtttcccagttttcataatgacgagacattctgcagtgtttcatacacatgtcttttccccatgtggagtattgatccaggagctcattcagtcaacgcatgtttatgaagcatcctgtgccaggctgtgggctggtcactgtcttcagcagagagaggacaggcacagtcttgccttcacagagctcacagctcagggaggctcttagaagtgggatactggtcggagcatgtgcacattaaacatgatgaggtcaaggttgctatagggactaaaccacagtcccaccaagatcgcattgagttcctgtggtagaccagaggtcagggcccctaagatgtcctgagcagctccctctgctcagaagttttggttccacaggtgacacacctgagcacaggtgacccctgcagaacctgtgattaccacccaaagccaagagtgagtggtgggtgttctaggaggaaccgtcacctccatgggcagggttggggaagactgaggggagcaggtggctgatgactttggccagaaggtagggggatgggcaggtgtgcgctcatagggaagggaagagaagggagggcattgcaggcaacaacacaaaggttggaacctgccttcatggactgagaaaagcagggagtccacccaggctgcagctggggagggaagacatggggagcagtgggtctaggggagaagcagactgcgattgaccttggggactgggcagtgagcagaggtgtgttatgtgtgtctgtccccatcatagatatgaggaggggtgaggccgcgggtggcacctgggtcggtgggatttcatagtgcctgctgttccctagagcctctctgtatagagggtcagaatagatctgaggctgtggtctgggggaaggggctggtggtgcttaccatctctaggggtgggaggagagggatgaggatgcccctgagcagtgaagcctcaaggtgtgtggagccacagttgtctctcattagacatgtgttttgcgtgaggatgccagggcctggtggttattactgttgtcaagtttgcatgacaaggacccaggtatccagggatccagagcacagggcccctggtgaggggatgaggctcagatggggctgaccaggttcatgtggtcagagtgggagggactgatggagagacagagcctcaacccctcctgtcaggagctgtggctatgtccaggagagatgacaaggatgacccaggacattgagtgagtcattgagacattgaaggtgaggacagggcagagaggaccctggtgactgctgaaatgtaggatgtgaggagggctctgacccatgcaagttacaggacctccccacccccgagcccacagatgacccttaaattgggcatcctgagtgctgtgtgtgcccagcagggacactggataggctggacctgagtctctgtaagggcagcgctggtctgtaggaccagagtcttctctgtgggtgtgacgtgggcaggaattagcaagatgggggtgacaaggcttggcttggaggatctggtacagaagcccatgggcttggtcagctcagcttctcaggggctcagctggggctggaggagcaggatgctgtgctcagggcatgctccaggcagcgtgatgtgtgtggttccagggtcaggcacgggggtcaaaaattaaccatgaaaagttcccaccttctgtaggcagagaaaatggcctgattgtcagggtcagggagacttaccatgtggccaaagcaggctctcagcctcccagagaccacaccctgggtgcagcactcagctctgcagggtatggcaatagatgtgccaagaaccccaacatccagatgcatgcaaaaattttgcgatatataaaatagagcagatcaagtttccctgcaataacgttgttcctggttgtgtctttttcttgtaaactagacatggacatctttccagcagtctgttctcatctgccaccttcctgctgcagcacctcagaatgaacattcctgagacactgtccgtggtgctgacgaccaagagctatggaacagagtgtgatgtagaatcttctagttacctctgctctcctttcacttttaacaacagagcatcattaacaatgagaaggtggagaggtgttcaggatcttgaagtgacttctgtcttgctctcccataaccctgaagctgctgtagacattattgcagaaactgacaccacagtcaggatggccttgtccaggagcccatgtgcagtttgtagtgagcaaggatgagaaaatggtcttgaaaggggtgatggacagaacaggggcttttcaaaaatgtcacatcatcacccccagcatccgtgaatctgtcacatggtaagagaccttacagattaaatgaaggattatgagtttggaagattattgtagtttatccagatgggtccaacataatcacagaatcccttccttacaaatgagagagggaggtgggagagtcagagaaggaggaggagatgtggggatagatgcagaagacagagcggtgtcaagatgctgcactgctggctttgaagatggagaaagaggacacagccaaggatgcaggaggcctctaggaggtggaaaaggagaggaaacgcactctgccctggagcctccagaaagaacgcagccatgtgggcaccttggttcaagtttctgtgtcacttagcttgtgggaatttgtcacagcctcaacaggaacctacagaggagtcaccttgtgtgcaggtgggatccagggtcatttacagctaaatcctgatgtaaatattgcaggttgcttttcctacttcctatctcatggccaacaaccctggacaatggcagaacacccttggaaaccacggctctgtgctttagtggagggaccagcttgtttgtgggaaggtagcacctggtccaagtgaacctacatgagatcgttactctccccagggccctcagggaagggctgagaacagctggcccaggtgtgtggaggagctgcaggtgaggcagggctggaggggcctgtgggtccaggtagaggggcagacaggttgtcccatcgccatgggagcctgcacgagctttaggttggggaaccctgctcctctgacctggacgctcctgtgtggagaggaggcttgctcagtgagatccacgccagggggtaaattgggaactgatgggaaatgaggggctagagtcctgggtagtgcctgggaggaccttgctcaaggactgaattcttggtctgttcccaccttggttactctgacaacccctctctgtgtcccacggggataaagatctcctgagcagtggccattgggacagaggagaacctggtggccagagctaagcatccaggatcctggatttggggacaggcaagctcattgctgggggacagtgatagatacggcctccagggcctgggtgaagagagcaggagggctcaggacactggaggctgtgtggaggtcacacccacgatctgtaccacccatggatgctcctgcattgctcacctttgtgtggacatcagatggccccaacttttgcactcctgagacatctcatgcattcacagagggacccaggctggggctgtgcatggccttggtctctagggtagtgtgaggacagctgagcactcagctggctgggcaggactcctgcgaatcctgccctttcctgtgtagggtccaccccagcctgactcctaaccccctactcctgtctttccagggaagagagactggggttgagataaggtggagatatttttcctgtgtgacccaggagagaatggacatggagtttcaggtgagtttctgctaagttcccatgagcagaaaaagagccaatgagaggaagtttcccctttattcagatcctttccaggtgaccccgggtgggccataggcccattcactttccctgcaagcccccgcttcctgtggtgatgggaagccttcgccttggcccacccagagcccggggcagtctgttgaggtctctatatattcagcagggacccccatcccttcctgtccccaggcctgtgtctcctcaggactcagagctggttctctggctcaggctccatgtccttccccatccccagggctgggggcttcagggacgctccatcaacccacaggagcagctcccagaggaacctaagaagccacatctgctttgtggtcgatccagcagtaaatgtttgtgtcagagtgtagcaattccagtaaaaacagagaagaggtcttgacccctgaggccttctcagaacagggtctggcatctctctctgggcccacccagggctactctgggactgaacctggctgtgctcagggggttcctgctcccaggcccctccctcctctgctcaccacctcctgttattttcactgcagtttcctgaacttcagctcagccagatgccagtggggacagatcctgggtctccctggggcccaagggaccagaatatctgtggcccccactcacctcatagatgagagcagctgccctggtgctgggtaggggaatctgggcaggggagagaggggtgtcaggggacagggaaggattcctgctgtgtaggaattccagggctctcctcaggtgatggagggtcccagggtggggttagcacagggagtggatgatcctggccctgaacagaggcccagctcatggccagggcaggtctaaccttatccaagtcattctgggtagggtgggtttgtgctggggattgacagtccccctgccctgagcctgcacagctggggccccagtggaaatgggattgggaacggacagtcttacctaggagatggagctgtcagagggtccatggcctggggacagagacaaaagtgagcacgagagtgttaggatagctgggcccctcctgcaagagtgtgtgggggtcctcagttcttagagaattggggagagggagcctttctcaggttattttaggggtcaagtaagcaagtgaggttgaggaagtgacccatgacccagagcccggaggttagggctgacccggccagttggggtttcctgtgtgatgttttatgggatcctctttgcagccccagggatagggtcagaggcccctgggtgtaactggcaggagtggacaacttggggctggcttagtagttcccagccacacccagactgaagggacactcaccgggggtggaggctgggggctgctgctccctgaagtcactctgatcgctggccctaggaaaggtcagggttatttgtgaaggtgcaaggttaaaagtcacaaattggagttaaaataggggaccaggaaaggagcctatttccaagaggggtatggagacctcctttctttatggagttctgtggtaggaggggcccaggtgaggggagttgaggaaaggccttacaaagccacatctgtcctggccagaggggaaggactctcaggcagatgctgggccaggagaacattgatccagtgacacaggaaagggactgaggacccagggaaggaatcagaccaccaggggttgcctgagaggaagggtcaaggcaccagggggaaagcagggccaggcacatgtgcaggacactgaggggactgcatgcatcttggattctcctggaactcagtgtccctgctgtgaccagacactccactcagggctggagatgctgaaatgggacaatgatcttgtcttctgtctctgccctttggcaagagacataaacgacattccaggatatgccatattggggccccggttctcccttctcacagctcagtgtctgcagttaccatgtcagtcaaaggggtgctgaccccacccagcccgtccaggctgttccagtctccactatgtgataatgcccaggatcccccctcagatgccctctcactgggtggatggattcagtgaacagggggaggtaccaggtattgagcaccgctcccccctgctccaggcagctgtggctttgctgtgctaggaaactaggaccatgctcaggggcatggccttaattggactgaattcactgaggacaaagctgttgaggaagcagcccagggtcagcagctggtgaggaaggtgccatggaatgagagggaaggatccctggggagtcgggaggctggggagagcctggcactgaatacaagacagggtctccttccttctcgcctggggtcagcgtgaaggatgggagcagaatggggaaaagctgtggtacctgccagtttttcggaggagcaggaaacacacaagtgcagccaccagaagactcccaaccaggaccccgatcaggatgcctagagtgttgtcatctgctgaaagaagaaggcaaaggggatgaggtccaaatctgttccagggggaaccatgaggggccttgcagggcaggggcatggtcagggaggaaggaaatgccatggagcctgagtgtggtctgttgtgctgtcctcatagctggctcccttgctctccgtggttgcaccattttctgtgtcttaggcttgaattactgggatgcatcaactcctacattctcccacaggaagcctgcacctcatcctgctcctgtgttttttagtccctccttcctctcacatcactcctcttccccctgtttctttttttccatcccatggcagtcgtaaagggcaggcccttgctgccaactcaatgctgatgagcagggatgatgttcattgactgttttcaggggccttccacatggaaggcacagtgggaatcaatctacctgcagcttttctcaccctcccattgccttgagggagaagggtatgtgatattgtgaaatacgtatttggtgttcatcaccattgatatggttaggctctgtatccccacccaaatctcaccttgaattgtaataatccccatgtgttatgggagggaccttgtgggaggtaattgaatcatgagggtgggttttttccatcctgttcttgtgatagtgaataagtctcaggagatcagatggtttcataaagggaagcttccctacacatgtcctcttgcctgctgccatgtaagacatgcctttcaccttccatcatgattgtgagacctctccagccatgtggaattgtgaatcaattaaacctctttcttcatacattaccaagtctcaggtatgtcttcattagcagtgtgagaatggactaatacagtaaattggtaccagctagtggagtgctgctataaagatacctgaaaatgtggaagtgactttggaactgggtaacaggcagaggttggaacagtttggagggctcagaagaagacacaggaaaaaagtttgaaacttcctagagacttgttgaatggttttgattaaaacgctgatagtgatatggacaataaagtccaagctgaggtggtctcagacagagatgaggaacttcttgggaactggaacaaaggtgactcttgttatactctagaaaagagattggtggtattttgcccctgccctagagatctgcagaactttgaacttgagggaaatgatttagggcaactggtggaaaaaaaattctaagcagcaaagtgttcaagatgtgacttgggtactgttaaaaacactcagttttatgtatttacaaaggtatggtttggaattggaacttatgtttaaaagggaagcagagcataaaagtttggaaaatttgcagcctgatgatgcaatagaaaagaaaaatccattttctgaggagaaattcaagccagctgcagaaatgtgcataaacaatgaagagcaaaatgttaatccccaagacaatggcaaaaatgtctccagggcatgtcagagaccttcctggaagccccttccatcacaggactggaggcctaggaggaaaaaatgtttcctgggccaggcccagggctcccctgctgtgtgcggcctagagacttggtgccctgcatcccagccactccagccatggctaaagagggccaaggtacagctggggccatggcttcagagggtgcaagccccaaaccttggcagcttccatgtggtgttgagcctgcaggtgcacagaagtcaaggattgaggtttgggaaccttcgcctagatttcagaggatgtatgaaaatgcttggatgtccaggtgaaagtttgctgcagaagcagagccctcatggagaacctctgctagggaagtgttgaagggaaatgtggggttggaaccccgacacagagtccctactggggcactgcctaatggagctgtgagaagaagaccacaatcctccagaccccagaatggtagatccactaacagcttgcaccatgcacctagaaaagctgcagacactcaacgccagcctatgaaagcagccaggagtggggctgtaccctgcaaagccacaggggtggagcccaaggctatgggagttcagctcttgcatcagtgtgacctggatgtgagacatggatacaaaggagatcatttcagagcattaagatttggctgccctgctggattttgggcttgcatggggcctgtagcccctttgttttggccagtttctcccatttggaatgggtgtatttacccagtgcctgtacacccattatatctaggaagtaactaagcttgcttttgattttacaggcttataggtggaagggacttgccttgtctcagatgaaactttggacttggacttttgggttaatgctggaatgagttaagactttggggaactgttggaaggcatgattagttttgaaatgtgaggacatgagatttgggaggggtcgggtggaatgacatggtttggctcttcttcacccaaatatcaccttgaattttaataatccccacgtgttgggggaaggacccagtgggaggtaactgaatcatgggggtggattcttcccatgctgttctcatgatagtgaataagtctcacaagatctgatggttttagaaaggggagttcctctacacatgccctcttgcctgccgccatgtaagacatgccttttgccttctgccatgatttcaaggcctccccagctatgtggaactgtaagtcaattaaacctcatttttaaaaaaattacccagtctcaggtatgtctttatcagcagccaagaccagctcggtcgcggagatcctaacccagcagtgctagaggaattaaagacacacatagaaatatagaggtgtgaagtgggaaatcagggttctcacaggcttcagagctgagagccccaaacagagatttacccacatatttaataacagcaaaccagtcattagcattgtttctatagatattaaattaactaaaagtatcccttatgggaaaccaagggatgggccgaattaaaggaataggttgggctagttaactgcaacaggaacacgcccttaagatgcagattgctcatgctattgtttgtggcttaagaacgcctttaagcggttttccaccctgggtgggacaggtattccttgccctcattcctgtaaacccataaccttccagcttgggcattagggccattatgaacatgttacagtgctgcagagattttgtttatgaccagttttggggccagtttatggccagattttggggggcttgctcccaacagactaatacacccattttctggtatgtgactctaaagtccttagaatcttcaaagtgatgtctttttcaagctaataattgactgatgactggcagcccctaggcaacttcagaatgaggctggtcactgacccaggtaggattagagggttgggactttcagcctcacccctaatccctggggagggacctggagtttgaattaatcaccaatgaccaatgaatcaattaatggccaatgattgaatcaattaatggccaatgattaaatcaatcatatctatgtcatgaaccccaaaaggactgggtttgaagagctgaacccatggaagtttctggagtgtggtgcatctggggagggcatggaagctccacaccccttcccacatgccatgctctgtgcatctcttcatctgcatcctttgtaaagtcctttattacaaaccggtaagcctaagtatgtgtttccctgagtcctgagagctgtttgagcaaactaatccaacccaaacagggagtcatggaaacctcaatgtgaagccagtcataagaagctctggaggcccagacttgtgactggtgggaaggtggtggcaattttgtgggactgagccctctgctgatatgtccaggtagatagtgtcaggatggaattggaggacacctagctgatgtacggtgcagaactgattggctgctgggtgtgtgggagaaacccccccgcatcacatttggtcacagaagtgtgtctgtgttgatgattgttattgtggagtgagagcagaggaaaaacacagtttgagtttttccaaacagggtggaatcccatctgccaatttagaatctgaaacttatagtttcagtacttcaattaagattgaagtacttcaattcagtacttcaattaagattcagtacttcaattaagattcagtacttcaattaagattacagaactggtaagtgaaagtgatacaacaaaaatgtaaccaaagtctgctcaacttaacagctaataacaacaaagttcataaaaataataccagtcgatattgatagcactgattgagccctggctctgtgcatgaccttgttaagggctttaatcgcattaatctctgaataaatatcctcacaaccaccctgagatccaggtgtttgtaacaattctacagatgaggaaactgaggcccaggaggttgagtgtcttgcccaaggtcaaatacctggtacctattgtaaccaggatgataactggatgagtctaatccctgagttcttacccacattgctccccaggctctgaaggaatctcatccttctcattccgtgtatcattttacaccccccctccctcctaggaaaatatacaaggaaaggagtgagaggggccgagggtcactcacattttacagtcagcttgagggggtcgctcctgttggagctgactgggttggagacctcacactgatactccccagcgtcctcctgcctgatggggtctatggtgagcatatggttaaaccaggacagcttcatcctcttcgtgacctgcagacgctggttgttgaaaatccactggaaagaggttccagtgttatttgtgtggcaggtcaggaccacggagcccttctctgtgactgtggtgctgctggcttggatggagggctgagccactgactctgtggatagagtgaccaacagaaagtgtcttggggccatgctgcatcctcagagatctcagagtcaaatttagaacattctcctgtgaataaaggagaaagatgaaggacagggaggagcagagagaaccagagacacccatagcagcgagcagtagggactacagtgacctcagagaccccagggaccaggaggacccagctgcctcagaccaggaccagggagccctgaaaaccctcccacagatgagcggccccagagtcacatgagatgcaatacctggggtggctttaggagcaggcagtcagagaaatggaacatgggtctcagcccctaagggacaaggaagaggtgtggccagctcctcctaggatcctacatccaggacccagtctgtaaagaggttatgattattcctttcttttttcattaattccctccctccttcatcagagaactactgagtgtgtgtctcagttgggccttgtgcaggtacagggtgtagtgggaagagaaagctgagtcctttccttcatcctcccatgggagtgacatcaacaaatcaagaaattcatgatttcacgtccagtgagggaagaaatgtggatctgatgggagaggcttggacaatcctggcattgagtctgatagttgagacaggtgatttcgttctaagtaaaaactgactaattctccatttgcccgtcattcctcagaccagaatctccctctctgagctgaggatgcccaagaagaaaggagctgaaccaacatctggtcctggggtccacagatgccccacggtggtggccacgaccagattctgggctgcagacacacggtggtgtgacgttgagcactgacagcctgtgtgatgctgatgcaatttctctttaataaaatggggtaaatgtcaatggtccctggcttgccatcctctctgtaaattaacattaaaatatttacaattacctgacctaaagcttggcacagaatagctccaaataaacatcatctattattattttactccaaaaaaaaaaaaaaaagagttctctgggcctgattcctggtggagaaggagcggtccagagtgtcttttctctgctttccctcctcctgaggacagtgcacttcccgggacatcttttaagtttcccatccagtttaatggcctgggaagtttgtttgtctgtcctctccactctgactctcaggtgaaagatgaggctctgcccttgcccagatggggctctgggggctgagccctgcctggtgaccagctctaggaaccacggccctgggacagctggtaaatcgttgctcacaatcagccctgcccaggaagccacaacccagccctggcacaggctccccagggtcatctggagtcaggatcttgggacaggggcctggggcaggggcttgaagggctgagcttctctcagaggatcctcaggccaggccctgactgagtcctataagatctttctcaggtcatgtctatgaggaggaggccaagcggggttggactgagactgattttcccccgctgcatctcccgcatcagactatccttcttgctgtagggaatttccacggagtccggataagggaaaggaattctgatctgttatagtttgtctcccctgggtgtgtcctgcactaaatgcccaaaccccaacatgggacgtaatgcagagggggatgcaggcacagcccaggcctgacaatcctgcgtatgtgaagcagaactgacccccaacacccagaggcacggaggaatcactcaccgtatacacggagatggtgagatgcctgttcaatctgagaatttctgtatgtgacttgtagggtgtagtatcccgtgtcctctagggtgacgttctggaaatgcagatctccactgggtgatattgtctctcgaccgctgtatgcaggccctggagtcctaacgtgagtgtctattacatatgctgcgattagctggttgggctccaccgttttccctttgtaccagccatagctgtaaagattctcgggcagataaaccacagagagatgaacattctccccttcagcaacttcaaagggcgctgatgcaataaagagccaggcagtggtgggtgcgttccagaaagttaaaagtgaggctaggaaagggagagaatatcagtcaatatttgacctatgcattggcatggaaagacggggtcctgggtgcaggtctcttcacccctcagccttagagggtgtgtgtgtgtgtgtgtgtcctactgggtcaaagtcagcagcatgaccctcattccttcagtacctctgaccttggcatttccttgtgtgaaccctctttcccaggggtctgcatggttccctccccactgccttcagttcctactcacacaagggaatccctgggagacttctttcgtgaagcctcctctagagaccctgggtcttccctttctgacctttcccagctctgttccctccagggctcttgtcagcacctgacctcacattctagatctctttgggtgtctgtcttcccccccatgagattgtgagctctgtgagggcatggacttgagtgatgttagttgcaccccagtgcctgggacaggctgcagactcctgtggatgagttcatgagcgttcccagggccttccatatcctggggtttatttgctaatgtctgaggttggcagatgaagacagagtttcatgccctggtggtgtttttatttaaattgtcactgtgatatagttttactatcattttcaaaatgtagtggccactgacaatgaacttgaaaacatggaccaactgagattgttttgccccttggcaattccagttcacttagattttttggttctccttagacgctctctcccctgagtctctaacaaaagccctctgtctcctctcagagccccatcctccccaggagaccccagccagtctctgtgctccctcctcccacccactcccagggagtcctcccctcacctgtgagcaagagcccctgccaggggatgcattctctgtggggacaagctgaggggggccccatggtctctgctgcctgctctgtcctcctctgtggagaggagcttgggctccaggaacgctctagacagggttactgtgactgttgtctctgctgtccttccttcctctatgctgagcttcctctcaggcaggagcacttcccgtttatgggcaagggcggggctctgcctacaatgtctctctgtcccctcccctctcagtcctgcctcccttgtccctcctttctccttcctttttgcctatatttggttccctaggcaaaactttgagaagcaacgctgatggggtcctcataacaggacgacccactctccccagtactgacctctgctgtgttctggccttggttctgtcacagccggtagattatttccctttgtgacacacaaaaccagctgggccctgggtctcctcatgctctccagtgctccaggaaggcagaatgatgcccagcaggaaagtgacagaggtggctctgggggctagaaaggggctcactgggtgatggctgggaaggacccacccgctatcttcagtgtcaccagcctggcctctgacccagggacagagacccaggcctggaggtctcgggaggatccccagctcctaggtgtggagggaggtgtcctgtgtgtcctgggaagagaggactttgatggaaggaggtgggaggctctgggttctgctgtccttggtgaaggtttcagggggaccctctccatgtctggggtctgtgcccccagcttaactctcattctctttgcaaatacatatattttgtggatctgcagttgcctgaactgtctcatgtccctaaatctttgtatccctttttacagaaggtcaggaagggtgtgtacatgagtatgaggactatctgatcagggcgagtgtttgtttcccaaagatctctttagatatggtataatacataagataaatgtactgaattagcaattttaagtgtagaattaaatgatactaattctattcacaatgttgtacaaccatcaccataattttttaccagaaaatcttcattataccaaatggaaacttcatacttttaatcaataactccccacttccccctgccccacccactggtagcctctgatactatcaatctctgtgaatttgcctagtttacatgtctcatataataaggaattatatacgtgtattatttttttctggattatttctcttagggtaacacttttaagattcatccacgtcgtagcatatattacagcttctttcctatttatggctgagtaatatcccaatatatgtttatacctcaattttaattcattcatctcttaatggacatgtgggtggtttccacatttttgctattgtgaaaaccgctgcaatgaacttacacttggaagtatctgtttgggtttctgtgttcatttctttgggggtacatataggagtataaatatggggtcatgtggtagttctatgtttaagtttttgagaaacagccaaactgttttccagtttgctgtgctattttatattcccatcagcaatatacgagggttccattttctctacattcttgtaaacacttactatttaatattttttaaaacttatagccattctagtaggtgtgaagtgatagctcattgcagttttgattttcatttccctggtggctgatgaagttgagcattttttcatgtatttactgacaattttaatattttttagagaactatttattcaaatcatttgctgtttaaaaaaaatgggttatctttttattattcagttgtaatagttctttatatattttagatacaagtcccttatggggtacatgatttgcaaaatttttctcatattctgtgtcttctcactttcttcatggtgttctttgaagcacaaacatttttaactttgatgaagttcacttatctatttttaattttgttacttatgctcttgatgtcatattgaagaaaccattgcccaatccaagatcattaagttttactcctatatgttcttctaatggtttgataagttttgctattccatttaggtttttgaaacattttgagttaacttttgtatgggctgtgaggtaggggtctaactacactatctcgcatgtggttatccagttgttccagcacaatatgaagaggctaccattctttccccattgaggaatcttggcacccatgtcaaaaaccaatgggctgtaatggtgagggtttatttctggactcttgattctattccattgatctctatgtgcattcttgtgccagaagcacactgttttaatgattgtagtgttttagtaagttttcaaattaggaagtgagtcctccaatttttttttccagattgttttggccattctggggtgacttttaaaaaagatgtagttcaatggttctcaaagcaggagtggttcagctctccttttttggcagtctggagacctttttaggaccttaatctaagtagataaattattcccactttcttttctgagttgctatgttacagtgtatattgacacccatgaaataattgagagaccctggaagtgcttgcctacatagtgagggacaattagttccatgatcatgggcacagaagattttgttttgggaaacaattttgttggtggagttatattcatgcttactcttttatttgtcttcatagcctgcatctccttcagacttcatatctgtttattttcttgtttgtcctctggggtttgggtgttgggtgaccagtcagctggagctggaggaggtgcttagcaaggcagtgaccctggttgggaggagcagggctcagcagggtgaaagtagctgggccttgagtcaggagtggcatctggaaggcctgactgtaagggtcagaagggccagcaggtgggtgtcctaggcacaaacggtggctgctgctgtggactggaggaaggtaagaggccccgagtattccatgttcttactggctccccaactgaggattcctctcctgggctggtgctgtcctgcagcagggaggggttagacagggacggctgcacatcaggccggagtccatgtcatcctcttaggcactgtcactacagattgaggattctgttcataagccaagcctttgcacaaggaagggacccgggctctcaaggaagagcagctcctggtcagacctccatctccttctctctcattgcctgaggcctcaagcttggtctacctggcacaggggtctggatcctcctcccagggttggggtcttactgagctgggcacctgcaggtgggagaagatctggaggggccccatctgccttcaccagattgatgttgagggtccctgagtcctgcaccactatcaggtgctgagcaacttccagtgtcagtgacaaccaccccatggtggaagcagaaccacctcgtgagaaagcacctccaagcctcagtgcttgccatgtgtgggaatttgctggtttcagttgggggcatgttggtgggtggtcatgaattcagggccggattctatgctcacagtgcacatgctggatgtggtacagaccccaggcagggctcagtggggtggttttgggtgtgcacaggtatcttttctggaggagctggtggtgatttggctcccagaagttcctgagctctgcagactcaccaagcactcaatatttgagtgaacattgggcgagagagcagaaggtaagtgtcagggcatcggggttggtgcctctgggaagaggaggaacattctgggaacaaagctctcccccggcttacagggagcttcccatcgctcctgccttgaggatcagggaaactagggcctctgctcttccaggggctgcttgcaggcagtttgctctgggagggggtgacccaggagttgcctctcattttgcatttgagatttaaaaggagaagggacagtatatcttgccaggtcacaaaaattacaggcatcatattgactgaagggcactcctgtcatcactgcaatataccagaatggtcttttaaaaaaataagtgatttaggtttaccagcaactgtaatgcttgttttattcttctagttcaccgttaatgtcacttttgtagttttagcactggcaatgttgattttatgttgactctgatgattttaagctttcatttgttcacatagagatcatcttctttctgaatattaatgcattttttctctatttctactggttattcctgtacatagagtagagaatcacttttcccaaggaggtggaaagcttctgactaccaaaaaaaaaaaaaagtgtcaaaatgctttaaagtcagtaacttaaagatcaaatccaagagtgggcaacagattctgcccagggtctgaaaggtggagaggtgactggtgaggatgtttaaaagacctctcctctctactccctaaatgggggccatccagtgttcttgaggttcagagaaggcccagggctggggcagcagggcactgtcagctcccagctcccaggggccaggagtaagaccccaacactgtccagacactgattgcattcattttgggggagagtagattcttatttaaagaataatacaaaagtctacaaatatgaacataaacagaaattcctttgctacaattttccccttaataagacattccttcctaatgacatatgtgactgcattcatggctgagatgttttctaggatggtgagagcatcagagtggactatctggtgccttggggtcatgcattttcttcttccaatgtctacaggatcccccatgtcccactttgtagtgtaactcagtgtgtgtcattctggtttttgttgtatagatccttggaaagcccatgtcattcctgctgtgaggtacaggcagccaaatggcatcatctctaaacatgccttctcctggtacatcaaattatggaataaatgaaagccattttgacagatattgaagatataagtttctactcttcccacacatgcttctcccaagtgaaggattttactggtgaattgttattagagattagtgtggatcagtgactctgccaggggaaattttgccctctaggggacatttggcaaagtctggaaacattgttggttgtcagagctgggggagggagtcctgctggcattgagtgggtggatggtgctgaacaccctgcagttcacagagccccaccagtttgaccacccaaatgtcaatgctgaggagtggagagccctgctgtgccctcccgcagcttccctgaagcttcccctcacctgctcctcccatgtctccccaccacttccccacttcacccgcctccttacacctcagtcccctccacctgaactcaccccttagtccaaggccagccctgatctccgctctcctggtctccttgctccttagcaggaggcgcccactagatggcgcccttgcccttactggagctcaccgtctccctttccaccctgagacaaatgtggctgcttttactgccacaaccccagccctccacactctagatttgctcagggagcagctcctggacagacctcagggaccccagggaggagcctcactctggagattttgatggcatggtctttgaacttcactgttacccccagtcaggatccaggatgttgggagtgcatgattctgcccggtcccacttcagcaggaccccactgctgagttgtctgtggggacccgggcctctcatctccttcttgcattgcaggagagggatcttagcactgctttcacataaagtcagataatggaggagtgcaggtgagtttgggaaggtggacatgaagagaggttgtgtccctagaggtggcagcagtgagaggatgggcaggtgggaggaacacagcccatccagggttgccagccatattaggagcgacagcctttcctctaagcctccagcctttttcctgaaacattccagaactttccacttcagcacttcccactgaggctcctcaggtctgtccctgagctcccagctgagcctacctacccatctgaaatcctgagtcctgtgtcaccctcgttccccattattctgtgcagttctgtgggacgcccagctctcctgacacccccagtcttcagaatggccatcagcgctgtcgctgtggcaccagggtgactgccgcctggaggctgagtcctggcttcctgacagctgtggggcccgctctaggctcccttgtcctgatcattcatcacctccaggatgcacagcagctgggccagggggaggagcagggacaggtgtcagccaccctgtgtgtctgcaagtcaggctgggggtgtgggaggacgccaggaatgactgaactttctgatttagagggtgagagcttgcactgatggaatttgggatttaataggaaaagcatagcgttttcctattttgtaggcagggtggctggagtttggaatcatagattcccctgggatgtcactgtggacctcagtcccacccgttaggggcacagatttcagaatccacaccctggggcaaagcaggcatgggaggctccatcagcctggccagggctctctatttgtgcagctgctgcaaggagatgtgcactctgatgggaacagtgctccctcctccttggggggcagtatctagctccctgcagcccctctccctgcaggccctgccctctctgaacctcaccttccccaacccgccccccgcaatcccatctcagctgtaatcccaacactttctcatccattatgggtggactgcttgagcccaggggttcaagactatgctggctggacaatatagcgagttgttgtctctacaaaaagacaaaaattagctgtgcatggtggcatacacctgtagtcccagtcactcaggaggctgaggtgggaggattgcttgagctggggaggctgagttggcagtgagttgagattgtgccactgtatacttcagtgtaggtaacagagcgagaccctgtctcaaaaaataaaagtaaaaaaaaaaaaagaaatatggaatacattattgttaactctaatcaaccatgctatgcaatagtccaccagtaataccagtaatagccaataatgaattatctgaaaaagaatacaatttattcttagctatctactgctaaaatttttaagctatcttttatgatagctgaaacaaaagaagtaaatttaaccaaggaagtaaaagacctttataatgaaaactgtaaaacattgatgaaataaattgaaaaagacacacgcacaaatagaagatattccatgttcatgaattggaagaactgatattgctaaaatgtccttaccacccaaagtggtctacagattcaatgcaatttctgtcaaaacaccaatgatattcttcgaagaagtagaagatcctaaaattagaaaccacaaaaattcctaaaacctgcacaaaacaccctgagttgccaaagcaatcttaaacaaatagaacaaagctagtggcattacacttcctgacaatcaaagcatactgcaaagctatagtaaccaaatcagcatggtcctggcataaaaacaagcacatagatcaatgaaacagaataaaaatcccagaaataaacccatgcatctctagctaactgattttcagccaaggagccacatgcacacaatggggaaaggacagcctcttcaataagtggtgctggggaattggatattcatatgcagaagaatgaacctagaccctatccctcaccatgcacaaaaaattaactcaaaatgtattaaataaagacttaaatgtaagaactgaaactatgaaactactagaagaaaatatagggggaaaatccatgacattggtctaggcaaagagtttttggataaaatctcaacagcataagcaacaaaaccaaatataaacaaacgggatttcatcaaactaaaaagcttttatacagcaaagaaaaaaaaggccagcagagcaaagagacaacctacaaatgggaggagaatatatttgtaaatatatacatatatatttgtaaatatatacatctgataagaagataatatccaaaatatataagaaaattatgtttctgtatagttttatctgactgggatacagaggccacatccacagtcccatcctcaaaggccacttgttcccaaaatgtcaagcacatccctcaatgatccatcatcaacacctatgtctgtaggatgaagggtgaatcatgaagcactaaaaaggaagaaggaagccaatcccaaaacaaaatgatgcagggtctggaaagtccaaagcattttttttttttttttactgcatcttcctcctttcttctccacattcccaatcctcactattgattaacaaaacaaaaaaaactgggacccaccatcttccctactgtcaggagatctagcgagattgtttgagtcttagaccaaactttgccataagccaaatttctggctgactttacaatgatatgagctagcacagtctctttttctgccagtcaacttgtgctcggttttatttgcaaccaaatagaggtggtaaccaaatataggtgaccctaaaattagtcatcaggatgaaatcctaaaatgtgcaacaaactgggttgaattcaggattagtagcaacatctctgttgtgggcttgaaaagggggcacccttttatgcagtagcaaaattgctaaattgttgtttgctgagtctttggactctcatcccggattttctatgaccattcaaacagggctgcaatgaacatctatggttgtttagcttggcacacttctacatttctatatagtaatatctagaagtgcatttgctcaatcacaagatatgcacattttataattgactgctatcgaactaccttaaatagccttaatttgttctcaacattgtttaacagggtctgtttaatgtcctacgtccagcaaggacagtatcacttttcttaatatttttcaaattattggaccttaacaaatacttaatgtgcaattaattgattcctttgtattcccatgccttcttttatatgtttccttatagtacacaaaaccacattattgtttctttacttgtgtcattccaccctggaccattcctatctaaactataacattatgagagagagagagagagaaaacaatatgaaaatataaattgattaatcaaaaaaatttaaataggacaaatcaggaagacacaagagagattttaaaattattcagagaataccacaatagctgtaccaatatattttaaaacttagatgaaacggacaactatctcgataaatgtaaattaccaaaactgactcatgaaaaaatggatattatgaatagagcaataatcagtaaagcaattaaaaagacagttgataatttttatttactgacaacaataacaaaatttcaggtcctgatatttttatggtgaattttaacaaattttcaagctcctcctcaaccaattctcagaaggtttaaaactttaacaagaaaacactttctaacacattttcagaagctgttatagcatgataccaaaaccacacaagaaaattatagaccaatctcacttacaaatatacatgcaaaatcaaacaaaatcttagtgaaccaaattcagaattaataatagcaaacaagcaaaatatgttatcatacgtatggcttatatcaggaatgcaagtatgtttcaacatcagaaaatacttctccacattaacagactaaaggagaaaaacgcttgtttaattatctcaataggtttttagagaattttgaaaattttataaagttatgcgtattctgtaaaattgatgaaatccaaccttgatttatttttaaaaattgcctttcctatagaattataggtaaaggaaacacatgcatcctcacagagctacttcaaggctaagttacttcccataagtaacgtatcctgtaatgtgtgcttggcacatattcaatactaaacaaatatttgcaaatcctcaaaccacttctcgctcaaataacccacctttgtcttttgcctttatgttagggttgattttctcaattgtatcttggagatcctttggtgggtctttcagcaattaccctgaatttgcttttctgtttacaattttaattcctgggaactctttcttgttctctgactgcacccttttcatgagagttcagccatcaatcctccagaaccccaccccccccgcccccccaaaaagcaataaagatgtctaaaagcttccttctgggctttcgaatgatgtttaccccaggcatttgttctattcgttcatcacccattttccctacaacttgcctacacttgatatcagatttttatttattagtcacctatcttcttcattggcccattttcctattttgccactggttgttctcaaatgtgttatgattcctggttgtacagtcaagtggttgataatcttggatatacgataaagatttgctctgtagctgtgtgtaagcctatataaaagcttttgtatttttcttcttaaaaaagacaaaagatggttgggaagatccctccagttcaccagttcgaggctgcagtgagctatgatagcgccgctgctctagcctgtctgtctgtgaaaaacaaggggggcggggggcgggggggaagactggagatgtaaatctcccgcagggccctacccgtatccgcaacaggtctctaacaggaacagcctcaggcctgtgttggaacaaggtaggttacagaaatctggaagccagatctgtaacttcagggtaaggactggctctcagggctgatcccccgggctgggtgtcccagaggcacccgcccccgccccttccccaaggcaggccaggacaccttcactcctctccttaggctccccacccccttctcctccccactgtgcctcctggagtagcggtggcggtgccacaggggagcggggcggggcgggctctgagggcaagggggatgggccccgccggggtcactggcggccaccctggaaactcgacgcaggccggcccttctagtgaatcgtcccagccacagctggcctcccagccgcgcttggggcgcctcggggcgcgaatggtgcaggttggggagactcaccacgcaccgtcgggggtcggtccggttattcctcaccgctcggctccagtgggcgcgcgggcctctcctcctcagttcctgcgctgcagtccctccctcacccttcgcagcttgggaatccaactgtgtcattccgacggagcgccgtgaggacctccgagggtgttagcgccaagtgatctctgtccagcgctctgaatatccaagtaaaggagttcaatgaagggcgggtcaacggaggagaaaccgtgactctctcaagggagcccaaggcctccttgtctaattagtgacgcgccaatggatggaggctcttcccaccatctcttcccagcatccagtgacaccaccgccaagggacgggctcggcggaacctgcaggaaagaagcatcggctgagcctgactgcagcgctgtgaagagacaggggaggggatcagtagttggtcccgcgcccaccccctgtttccgcgaggggcggagttgactggccatgcaggcagagggcgaaatgtgaaattccactactcctaccgtttttccctgacccgatggggcggagtgtcgtcaggctaagttccctggcggtaaggtggggagattgaggcgcacacctgccgaacggtaacgcaggattagctaaggcgagctcaggacagaagcctcccgaggagcaggagggcaaaataataaataaataaataaataataaataactcactccttggtctttatttgcggcaggaattcagaaggtgaaagcggggccttaggatctttctgaccttttgggttttaagcaggaggtgtcagaaatgttaccacagggctagctggcttgtggccagcaagcgttcacaatgccctcgatttttcatccctctctgtgggttctttttttcattgtaaggcagaatttctacgattgctcacccactcagagaacctgagctggtttagaccaggtgagacaggctaggtttaccctggtgatgatgtgttgttgccatggcgatcctgcccagtaccagaggccctgcagattcagatgcttggtgcctgtgcttggctgaggggccaatgggtgaagctgccatctgcgggatgatgactgaagcctctaagtcagaatccgcccaggctgagccttagggcagctccatggagcctcggctggcctgggatagagagtccaccactgtgccagcccccagccactgcctaggtcctgtgctgagagccccttgtccagggaaatggcgtccagtggaaaagggaccacccccttgcccttcactcaaggcaggttggtgacaaccctgaagctaatccgttcctagaggagctgcttctgggtccgagttttctctgcagcagagcagctccctggatgggatctgttcaaagtccgcctttcacgcggaattttccgtccttgcaattttccacctccaccactaggggatcctctctgaccgcctcatgccggctctggcctctgagcaggggtttctcttctgcatgtgcgaccttgcgcatgcctagtggccttttgggacctagagctgctccacaccccgatggggttacagagtgcctcgcctccactccaccccaccagggttccttccctggctgggatgggatttcagaagcgccgaggaacagcccagacaggtgtgggagagtagccaaggcccctgtcccggggtggccaggacagcggtggcctcgcataggacctggctgggctgctgcaatcagtgtcctgccccttggagagcaacagtgaaaacaacaagactatcttcacccaccttaagaaagaacagaaccagtatccccaactctgctgtgtatcccaacccaattccattccccaccccactctcagtagccaatatgcaaaatattagaatactcttactgttattattttcaaccacactctgcatcctgaaaaaccatatatttcgttatgtgcttttaaacttcttgaaaatgaaatactgaggctgggcgcagtggctgacacctgtaatcccagcacttcgggaggcggaggcaggcggatcacgaggtcaggagatcgagaccatcctggctaacacagtgaaaccccatctctactaaaaatacaaaaaattagccgggcgtggtggcgggcgcctgtagtcccagctacttgggaggctgaggcaggagaacggcgtgaacccgggaggtggagcttgcactgagccgagatcgcgccactgcactccagcctgggcgacagcgccagactctgtctccaaaaaaaaaaagaaaaaagaaatactgaattttcaaatacttgctttttttttcggtcaaaattatgttctcaaatttcactcctgtagatgtgcgtggctggctgtagtttttgcatttttattattaggtattctcctgttgcattaatatgccacattttatttctctcatgtttttggtgaccacttggggtgttttttggttttgtatttttgctgtatacatgctgccatggtggacatacctctttatacatatttcctgttgtatgcagacacaattttaggatgtgacatcttcagcttttctattgtgtcgtgtgtcttttccttcgtgctttgtgttatttacatattctggacacagattctttgtcaactgtatgtgctgcacatctctttcccagtttgtgtcttcttcttcttttttttttcttaaaaaaaactttctttatagtgttttttttttctttctttctttgttttgttttgtttttttgagatggagtcttgctctgtcacctaggctgaagtgcactggccgatctcggctcactgcaacctccgtctcctgggttcaagtgattctcctgcctcagcttcccaagtagctgggattacaggtgcctgtcaccacacccagctaatttttgtatttttagtacagatggggtttcaccatgtttgtcaggctggtctcgaactcctgacctcaggtgatccaccctctttggcctcccaaagtgttgggattacaggcgtgagccacagcacctggcctgtgttctttcttaagtagatgttacttttaatataatagaatgtatcatattttgcttttatattagtactttttctatctaattcaaacacatccccaagggtctttgtgtgtagactgaccaatttctcaagaatcatgaatgaatactgcttctctttccccaatttatctgtaatgctacctttattataaagtttctatgcatgtgtagaaatagttcctgatttttcactctgtgccaccagcataccaatagcacgctgtcttaaatattaaatagcagagctttatgagacaacttgatgtgcagtaggcaattgcccccttgttactcttcttcagggttctttgttgtaccacatgaattttagaattggcttgtccagctaaaagacaactgcaaggattttatttggaagttcataattctatacataatttggggaaagtattttcataataccaagtcttcctattaatgaacacagactctctctctctctcccccacccccacctgtttagttatttatatctttatggtctgttagttattgtttattgtctttcaaccaggtttcatgtttttctacatagaggccttgcatgtgaaagtctttcttcctagcttgctattacaaattttttttaattgcactttttgggtacagtggcttgtactgtaatccccgatacctgggaggctgaggcagatggattgcttgagtccagaagttcaagaccagcctgggcaacataatgaggtccctgtctcaaaaagtttgttttaaaaattgcatttgctgttattcaacaaatgtcattgtgtctcatatatggatttttatatctgataaccttgttcaacaatcttttgattctaacaatatatcagattcttttgagttttccatatagacaataatgtcatctgtaaattataattgtttcttctttgttatttcttggaccttttattttatatttttgtcttgctgcaaggcaatatccctctatatattgtggggtcttttttctcataaagtggggatggtgaacacccttgtcttgctctctgattgtataaagcatgctttctgtagcattttgtagacgctcttttttagattgaggtaattcacttttatttctggtttactgagtttttagcataaattcaggctgaatttgagctaaagctttttctggagacatcatttgaaaaattcatatgatttactttctttaagtcaccaaagttatgatttacattgaactgagtttctactgtttaactgtattcttgggagaaaacccacttgtcactgaacaatatctgttttatttactgctgtcttgtgtctaaattttcttttaggattttttgtatatgctcagattagcctgttattctcctttctgtatttttttctggtttgggggtcaaagttataatagcctcacaataagagctaagaaaccagccctaatggaggccggggcaggaggtttggagttcaagaccagtctgggcaaaatagtgagacccccatctctatgaaaaatagaaattagccaggcatggcagtgagtacctgtagtcctaggtacttgggagggtgaggcaggaggattgcttgagcctaggaatttgaggctgcagcgaactatgattgtgccactgtactccagcctggatgacagagcgagaccctgtctcaaaagaaaaaaaaagaagaaataaaaaggaaaagataaaagagctaagcatctgtttccttttttccattttctgggagagtatgtgtaagactgtaattaactgtttcttgaataatgggagaactctgtaaaataatctggctttggtgttacctgtattggaaggatgaaaaataccaattcagtttcattattggttgatagggctactcatgctttttgttttgttttgttttgttttgtttttgagaggaagtctctctgtattgccctgttgtccaggctgagatgcaacgttgttcacaggcctgatcctggctcactacagcttctaacttccgatctcaatagatcctcccgcctcagccttcccagtagctaggactacaagcatgcagcatcacatccagcctcttttcctgcctgacccagttctggtttcctttagttttctaggtgttcatccattttatctaatgtttaatgcatttggcataagggtgctcagtgtcctttcattgtctgttgtctgtaactgttgccattttcattcctatttatgagtactggcgtcttctctcactttttcttaataatcctgctggaactttgctttttaaagaacatcttttgacttgttgattcttttttcatacatattaactattttcttattttttgcctttatatttatttcttttcctgtttgaaacattgctcttttcttactataaaaatgggtaagtagctcatgaattaccacctcttttaaaaatcttttctactgtaagcattttagcagtttacatttgcccacaagtaccacttcagctacaccctatgtgcttttacataaagtcttcatttttggtaagacatattctcaaattttaattatcacttgtttttaaatccatgatgttttatttgaaatgttgtttctaaagatacattttctggttatacttttattcttctaatttagcacagtggccacaaaacatggtctgtgcagtgcatacaatcgatgagtaatttctgagctgtagtatttggcataatatatggcaaaatttcctaagttttccatgtgtgctttaaaaaacttccagtaaaatacataaatctgttagatcaagcttctcacattgttcaaatagtctatatgtttactgattcatttgactgcttgatttatcaattacaggtaggaatgtattcaaatctcctattaaagtgtgacactcaagtggctttttaaagacagagatgccaaaccaatgaatacatgattttccccaaagcctgcacaaattctctaatgaaattttaccatgaaagtttgtttaattaaggcttactaaagcagtatgttgtcttttactttttaaacagagaatatatattttaatacatcgtttaagtttatgattaattatctattactgaggataagaatctttgcctgtgctcattcagcatttgcacttcatttatgatctgccttctcatagcttctgttaatttttatactagagacatttatttgtttgtataaatgttgaaggtttttttttgttgttgttgtttttgagtcagagcctcgctctgtcacccaggctggagtgcagtggcatgatctcggctcactgcagcctccatctcctgggttaaagtgattctcctgcctcagcctccagagtagctgggactacaggcatgtgccaccaagcaaggctaatattttgtatttttagtagagatggggtttcgtcctgttagccagggtggtctcgatctcctgacctcatgatctacctgcctcggcctcccaaagtgctaggattacaggtgtgagccaccgtgcccagctgggttttttatattataaggagatgtaatagatagatagatgtttcaaagatagtcaaatgtttttaaaatttaaaacacttttttacaggttgactttcaccatttaatttcatctatgtgttttgccttagagaaattttaaatgctatgtagatctcatgacttataattatgaagcattttgttttctgttttccacgaaacttagcttaactttgagcatataatagttgtaaaggtaggagagtaacactgaaaaaaggaattgcataaaaatggcacattttctgtagagttgtttatcgcctgaaaataggccccatttcatggaagtaagatgatcaggctcaggtccccagacgaaactcttggcatggtttttggagatagtccagggctcagtactggctctatcatttgctacttctcccaaagtaaccaatatctcatccaccctgagcccatttccatatctctaacatgaggataatagcatctaccttacacaccaagtagagggatcaaatgtaggaactaaatcaaagtaccagcactgaataacctacatcctcccacttcccaaaaggaagagagatgtatcccctgttgacaaacgagaccattttgcaggagagaaaggaaatgccagttcacttgcaatgtaaacatgctctctctttttagggatgtccagggacctgagagagaacccatgcttaccaaagagtttctagttccagacacacaggactcgaagggtgacaagtatggttttcagggtccctgaatccacccagtcctcacagaaactcctaaaagctgtcgattgacagcgttgagttcacagctctggtcctcacatgctgatactgcttgtgatatcgaacccgacaggaccccacatcacaattgatttaccaactacaatataatacctcctgaatctccaaattggctcacccaggaacaaaggcttggggtaaaactggattaggagatataagctctgaattttctgagggtgagacacacaaggattctaagtgacacgccacagagtaacgggtctgtgactggaggacccacagatttgtcttactggagacaccacatgcacacaaactccatccttagctgtggaaacaagggtcttttgctatcttagccgaattctgggagtaatttttggaggggaggagatctttgggattgcctctttcaggccctttacaaaaatacctacttcttaaatggtaaagcttacactaaactgaaaaaattacatccttggctttttatgaagtaggtgttggattgaatcactactggaagaagtatggcatcgcaaattctaagcagtggtcaaaggatggatctgttaaattagaaaaatctctaaatttataaaaagattttagattcctttattctaaacaattgacctatttgtactcatgggacaatcaaatttcaaaggagatatgtaacgatttcatggcttgcattaaaaatccttctgataaaattaaagataaaaaatctgaccccctgccaaaaaaatcttttgaagttcatactgcctgctttcaatattctgtgggattcacaatgaaaggtgccttatattgtggcctagcttcaagtttatgccttcgccaccatggcctgggttcaattcccagtcagggccccagcgcctttggtttaatgtttgcgtggcatttgacttttttacctatttagtattggtgagattacctttggtaaaaaaaagtttaaagagtggaaatcgcaattctttgtgttggctaaaatctgattataagagatctggaaggttttatttttctttttcaaagagctctatggtcagaagtcggcttcatgaaaagctaatatttaattatatgtacatacagtctttctggattttctcttttgcctcctgttttgaaaaatatttggatttgagtgaaactccgttttagaaattaattgcttggtacaatatacccatgtaactaccctgcacatgtaccccctgaatctataataagagttgaaattttgacaaaataaaattagattttgaattaaaacaaataggtgcttggttcctctgctcacttctttttaaaaggaattcctctcccatgtacttcttcttttcccttctttaccttccttttggcatctttggtatcacatgaagggatctagagggaattttaagtgactctgaaattccttgagaaatacacaaaaagatcccactcaccccttttgggggtctcctgttctccttgtggagtccagagtcagggacaggctcctccaggtctgcagctctgctctcttttatttcatcttggctgattgctttggttttgtgagtaccaggcattactttgtactgtgagagacacgtcctttgtgagtgcaacggctgctgggtcactggtgagggctgcagtttggagatggctgagagccgttgcaataaatggttgtgattgcagggggctccttgtttctttgcaagtttagatgagaaaggtgcagtttggacacagtttaaaggctgtgaaaacaccaccaatgaatatgatttcctttggggatggtctgattaaaagtgggctgattgttgctgtgctactagccttgaagacatgtttctacagcattgtgcagtgtggaaaaattgtgtggcttggtcttgtggcatgtcccttcttttagagacctcagattcaatgtgaaattcgggatttttgattttcaaagatctagatgccctgccttccagatgtgcctactcttcacatattttaaaattagatcctataaactgcaaatactttgttggcttctgtgagatcagaggtccagttagaaaaggaagacagtttgttaaaattaaaaactatttatctaatctaactagattggcctccaaatatgactttctgacattcagctggttactctgaaaagatttctaaatctcttgaggctcatctatatgtttccttgcaaagaaaaaaaaaaaaaaaaaaaagcaagcccaagcactagtaagaaaaagatttgcaatgtttcatgaaaggagtagatgagtgaagcatttatttgtagatactgggttggatacctgtgcaaagaagaagaggtcaataataaaaattgccaggggatttcttggaacttaacaagctgaattaaatatagaaatgtcaggaaatcaaggcaggaaatactcacttgtggttaggcagacagggcagggttctgagcttgagatggagcaaacagttgtggtgggtgaagttcacatgctttagagctcagctgtcctagtaaagaagcctaagagtctctaaagctcttatgagaagatggattttttttgcctagattaaaaggttaaagaattgctttaagttggataaaataaagctaaatgtttaagcaagttgtgaaaggtttatgaaaaaattaattaaaatatttttgtgtgtaaacatattgactaaagttgaaggggtataattcagcatttctgtaaattgagcattgaaataaaaacacaatgggtttctcttagagcactaacctgctctttaacaaaaattgtaaagggttatagaaagtctataaaaatgttaccttatggtcaaacattaaaattgggtaaatatgtctatcaggttttattaagaattaggtttaacattaatagtacactaatgtaaaggtgaaatttggcttatttggtacaaaaatcatacaggaagcattgtgaaatataaaatgatttttagctttctttgggctatatttctataaatatgttattgatgagggttccaaagttatgggagactcctataattctgctatatctcagtgtacattatcagtcataattataattgtcatgttaaattattgtgggccacagaggtaacagatttccttgtcaattgtgtctttgactatgactaccctaaaacgttcagtcacccatatacacatgttaccttgttttggccctctttagaaggtaattttataatcagctataaagccctaacaggtgctcttaaatgcaaattttgataactttggagattgtgacatcagaagagaggaaaaatgttcgggacacttggagagctaaaatgttcattgatatcaagcaggacaggaattaactgcatgaagtgaactaataggaggctgaagtgatctttttgactttttgcttaaaacgttgctgatcctttgttttgcttttcagagtcaaggcaaattttcttttgagctattgacagcttttaacgattaatcaaaatatactcctatgaacaccatttggagcattatttgtttctctctacccgatttccccagaatttggaaactatttgtgggtattcttaatttatggcaatatagttatttgcataagtgcaataagaatgtgttttctttggtaacaggacacaatttgaaaaactggttattttaccaaggttttgaccagaatgctgtgctttcctttaaggaatcaaacttgacttgtggagctaataaagcctttggaaaactgaccttatatcctgtgaacacagtccctgtacagggttactgatctgtgggaagaaaagaatgtcacattctgacaggtcaggaatcccaagttatcttgaaacttcaagaggacaggaattcacccaaccatatgtatttgatggtagaaatccatggcaggggctcagctttaaaaagtcttatctcagattccttctataaaacaaagtcccattaaaaccaattttaaaagcctatgtgaaaaataattattcttgctgcacctcgtacaaataaagtggcaaagcataataaagcaaattggtcctgtcgtaatttgtctttagtaaaaacgggaaactggggtcgggtgcagtggctcactcctgtaatcccagcactttgggaggctgaggtgggcagatcatctgaggtcaggagttcaagaccagcctggccaacatggtgaaaccccatctctacaaaaatacaaaaatgagccgggcatgatggcgggtgcctgtaatcccagctactcaaggggctgaggcagggaagcggaggttacagtgagtcaagatcgtgccacttcacgacagcctgggtgacagagcaagactccatctcaacaacaacaacaaaaaagggtaactggagagagggaagttatgtttcaaaaacttttggaaactatagtacacctgtttttaaattctagtctggcattcagtttttattattttctacagtttgggttaaattcgtatttctctggctacaagtctcctaaataatcttttcatttgtttcctttttctttccctttttccccatttttcttaattggaaatcactgaaacctaagctgtgctttcttaaagccctgtgaactgaagactagacaaccgaaacttctgaaggaagtagcagcaacctatttatatgtgttgctgttgcctactattatgttttagcaggtgctgcctctacacccccgaaacagagagtgctactgggaacaaatcgactttttccactccagtgctgcattcggtgccccataacgatgaccccctctcagcaggaagtagccagaaagattacaatgctccatctccctatgattcttgtgataaataaatatacaagcatgatagaaatcatgcgcaaattgacagtggggattgtggcaggccagatttcactaatggaggtccccatcacaactacttcagtactgactgagtggttaagttcagtatcaaaagctgaaagtgccagcgcctttctacaaaggctagaatgtaacaaaagcccaccaagggttttacctaggcctttcctgggccttacagcatgacaaaacaaagaaggaattcttaaccagacctgtttaggattaaacaaatttaattgggggtctgaagaaactcgccaggcctccacaaacaagttcattgggggtctaaaggaaccccccccaaacctctgtgattgagcaggagacaaggtcagggtaattgccccagcacctggactcatttagatttaagtaaatgtactgaggctccagagaaaggtctccaagacttagactagagttacagattaaaagaagttaatcacttatatctttagataaatgcacactgacacgtagacatacatcttagaaaatatataagctctggaaaaccttgtaatttacagttggtctggagatattttctgggccttctctctgtaaccggttccagaaataaaaaactctcttcctccccagtttatctgcatctcgttattgggccgtgagaaatagcagccagaccctgagtttggtctgggaacacactggctgggcttcctgcctggcggtagagcttcactgtcctccttcccagccaaaatgtggcccttgaaggcttcctccccaactgaccggttttgggttctaggtactcagggaacaccgtcttcaaggaggccattttcatactgttcctggtttgatttttctgaaattaggaaatgccccttgaggcatccaggattgtctttatttcccctgaagcttcccctcctgaagaaaaaagttctcaaacaccctcaggactcaaaccccaagttcaccctgtgaaacattcccatttcctaaacccaggcaggctcatggccctcagcctctcagaccccatggaaacctcctcccccacttcacgggttctctccatattgagagcctcccctcctcggcacacaacccagagactcaccccaacatgtgtagcaaatcaccctggaaacaatcatggctgaacgtggtagcccatgcctgtaatcccagcactttgggaggcccaggaggtggatcacctgaggtcgggagttcgagaccagcgaggccaacatggtgaaacctcgactctactaaaaatacaaagttcactgggcattgtggtgtgtacctgtaatctcaactactcaggaggctgaggcaggagaatcacttaaacctgggagacagagattgcagagagccaagatcgcaccattacactccagcctgggcaagaagagtgaaactacatctaaaaaaaaaaaaaaaaaaaggaaaaggaaaagaaaaaaaaaatcatgaggcaacattgcatttaacaatattttatttatcaaaagacacttgtctttctcaggtaagtgaaggtctagagatgaaacgagtcccgatgtaaattgccccatgggcattgctgagatcacaagatcatcactgcagcatgcagcacaatagtaaatttctcaggatggaagttcaacaatccaaaaggtagtattttttttcatgatgctcagtccatcatacgaaataaaaataaattccttttcatgatcatccattcagtagaaaaaatgatagtaaatttgttctcatgaagatttttaccgtaacatataggatttatcgttattattattattctttgttttttgtttttttgaagcggagtctcactctgttacccagtctggagtgcagtcgtgcgatctgggcacactattaacctccacctccagggttcaagcatttctcctgcctcagcttcccgagtagctgggattacaggcatgcgccaccacacccggctaattttcgtatttttactagagatggggtttcaccgcattggtcgagctggatttgagctccggacctcgggtcatccgcccatctcagcctcccaaagtgctgggattacaggcgtgagccaccgcgcccggcctcaatttatcattattcacgcatccacaaactgggttcttatattttgtacgtgattttttccattgaggagagatatctgtgcatattcatgctgctcatatttcatccacaaactcggttcatatttcatccacaaacataattttttccgttgagaagagatacttgtacatatttatgctgttcaaattcacatttcatcattcttttacaagaaatagataatgtattttaaggttttccagtggtattacagatattttactgggtgtatagatagaaattaaaccaaacttctttgttctggccgccagtcatgcatcctgttttcaacatagttcacatacaactggttgtgtaaaaatgaaattattttgtttagtacaatcatcaacagttggttgattagatttttaattatcaagttaatcattgtcattatgcttctcatcgcactcgtcattaattgctgtgggaggaaatttgttatgttccctatgagagggtgtatcacaaattcaaataagaattcaacgacaatggactgtataaaggaaataagcaagtccatggaaaacatatttttttccggaaaggattaaaatatttttaaaaaggaattaaaaaaaaattgggcacggtggcaaatgcctagagtcccagctgctcaggagatggagacagaaggattgcttgagcccaggaataagttggaggctgtagtgaacagtgattccaccactgtactccagccagggcaatagagggaaaccctctttctaaaaagacaaaaagaaacaaaacaaaacaaaaaaacaccacatcaaaaaacccaacaacaaaatgaaaaaccaaataacagcaatacaattggagctattcgatccaaagaagtaaatgaaacataaagcaaataaaagagaaaagctaatacctgtgtcctgcaggactcagtccaagttctgctctgactccctcctggtgagccaccccttaaaaagtcacttggggcggggttactttgacagacagtcttctgtcaaagagggaggcggtaaatagcacttttttttttttaatttaacgcctttccaacaaattagcggctatgttgtctaagagtgcaaatgtcagaggtgggtacaggcagcaagaccctccccacaggggcagcagaaggaggaatgactaagggaacaagactttagtgtgctcaactacacaggacaggaaacagatgctttttacaaaagctggtggacttgaaggcagaatattttcaagttcctgtaactgcgaactatgacctgtagcctgtgagagtgactttctgtggcaaaggagcttttgtgaatgtgaggaagttaattatcttaacagtgggaggttctcccggcttatctagctagaccctcgtgaaatcccaagtgtccttaggaaggggaagcagagagagatttgagtccagaagaggaagaaggtgatgtgaggcccagtaggggaacaaagggcgatggcatgtaaacacttagcccccagaagtgggagagggctggggttcatcacaccagaatccctaacaatcagccttattttaattacccttgaaatggaaggaggccttagagagccagaggcttggaggggcaccctctgctgcatacacagatcccaactgctgtgggctccaaataattgcaccagggaaatcacaaattatcaaaaataaaggatgtaaagcttttaaaaaatattaaaagcccaacaaataaaaaaagttctaaatctataaaattgacctcagtctgtatatttagatgagtcatgtgtatatagcgtttcacttcaaaatatatgataaatctctcattcattggcttaaaaataaacacttcaatcaagtctttatcagaaaaattgaaacgttaactcaattgccttttagttcatgtgactttacaaaacttaaaacaataaagtcagttttaaaaattattagtaaagtaaaagaaaaatatcttcacaatgtagacattttgtccacatgagacatgtgaaatattgccattactaaatatttgcaggtcaaaaactgtttccaaaacattttaaataatcatctggcctgtctgttttagagcattcaattctagctgaggtctggggacatgtgaaaggagccacggcccgactccgtgctgggaagagtcagacattttccacagctctgtcctttgctgtgggctctgcaactcctaccaattaaaattgcttacgtttttgttttatttttactaaagaggggttcctaaaagctaacattatactgagtatatgtaactaaaactactaagaaaacaatttcacaattatacaaatgtgccaagtaaatgaaaaaataaactgtattttaataaaggttataaaaagaaaaacatatagtggtgtgaggactgtctcaggtcttcactgagcaagggatcatgacattctatggcggacagctgaccttggctttctgctcctcttgattatgtctactaagtgacatacttactctttttccacctgtcttgcctctaagggtaacaggttttatgagatccctcctagtgctttgcaggtcagcctccctttgctgcattccaattttactgcctataccctccagctggcttttgatgacaaaagtcctggtcccagccattctcagattctgtcatccccgtgggcactatggagctcagcactatgggaggttccccaaaaatctcgttttctatgaggaatggccaccacctgcatctcagtgatgctagtgacccctttcctactcctgtgctcactggtcctcatgaagatcctggttggtctgtagccccctatttttcctattaaagagaaattacagtaagacccatttgtgtgcaaaatcaattttaggcttattacacttggcctgataatttgcataaaatgcagcaagaattcatcggccatataggctacttttgagttaattttcctgggtttttacctaaaaatatactattttggttagagtcttgtgaaaataaccaatgtgttcaattgttttattttaaaaggctcttactgaacactataaatatgtataagttgaatatacaaactatattgtcataaaatcacaacccaaaatgtggagaacgcagagggaaaggtaaatttgctcgcaaaaacatacttcacccaaataactggaaaaaaaaaaagactttcatgacccttctttaaccagagcagcagctttcaaacaaggtgtttgccttggaaatgccattcacaagccaaacggcccttgagagctgtctgtcaggcactgtagaatctagcagctcctcacagagttagaaatagtttcaggaaagagattccctgcttttagtaactgcactttatattcccagatagcgagattgtatgtaaaccatttttatcttattctggaactcttttgggtactttttttttttttttttaaatgatggagtctggctctgttgctcaggctggggtgtagtggtgcgatttcagggtatgagaaaatgcagctggacctggctctttccaggaagaccctcacagccaaggagtccaaagcctggggttttcatctaattccagtgtgactggggtaggagcagctttggtgctgggtgtgtgtgtgtgtgtgtgtgtgtgtgtgtgtgtctatgcctgtgtctgtttagggtgttaggctcgtggttgtctagatacaaatgtcccagggctcaggagccccagggttatgtcaggggcaccagatgaaggtgtcaacagaagttagggcacaagggacaaaggtgagagcaaggttagattcatttaggtgcaagaaatcatagagggaggagggagaggaagccctcctgctaccaccgaggaagaagcgcagcttaaggcagaaagcctgtccggagaggaagtgagtttgagggcagggctctctgggtaaagtacggtctgggacaccagcctgggggaagggtacagaatgcagagtggcctggcgtggggactaagaacagaggagagcagctttcactgggagggtcagtgttttcagtgtccagcactgagcaaggtgagatttgggcagcttgctgtgaaataaggtcaggctctggcattgtccccattgcgtgtgtgtgtgaggggcactttgggagagtgaactctccacctccatcctctcatacgtccttcaaccgagcttgccagttaccctgattccaaggagatctatttattgttgacaatactggatcctagcagaggctgggtaggagcctgggcacaagcaagtggaggagggggcctgggcctgaaagacctgggaggtttgagagaggacacagcccacagaatggagcagatggggtagagtcggcaagcattcagggctcctagtaagttggacaatggagaccctgaaagatccagtaaaacggggagaacaaacaggtccccaactcacatccttgcagtgcctggagcttcagactccagacaggtggggaaggaaaattgagggatgtgaacatgttggagaatgtcgtgccctgaagaatgaagaaaaggggggtgaggaatgagagcaggaacggcttccagtgcctggtgcccaggagaactcagaaaatgggtgtggtggagaggaatcgaggaaccggaagtggtggaagtgtgcagggcccctccgagatcactgtgactgccaggcgtcctccctggctggagagcttcactgtcctccttcccagccaaaatgtgtcccttgaaagcttcctccccaatggactggttctgggtcctatatatttgaaggggtggcctgcctctccacacctgtgggtatttctagttgggtgggaggagagacagagaaaagaaataagacacagagacaaagtataaagaaacaacagtgggtccaggggaccagcactcagcacaccaagggcctgcaccggcaccggcctctgagtttcctcagtttttattgattattattttcattatttcagcaaaaaggaatgtagtaggagagcagggtgataataaggagaaggtcaatgaaaaacatgtgagcaaaagaatctatatcataattaagttcaagggaaagtactatgcctggacgtgcactcaggccagatttatgtttctctccacccaaacatctcagtggagtaaagaataacaaggcagtattactgcaaacatgtctcacctcccgccacagggcagcttttctcctatctcagagttgaacaaatgtacaattgggttttacaccgagacattcagttctgaggggcaagcaggagacagtggccttcctccatctcgactgcaagaggctttcctcttttactaatccacctcagcacagaccctttatgggtgttgggctgggggacagtcaggtccttctcatcccatgaggccatatttcagactatcacatggggagaaaccttggacaataccccgctttcaagggcagaggtccctgcggctttccacagtgtattgtgcccctggtttattgagactagagaatggcaatgacctttaccaagtatactgcttgtaaatattttgttaacaaggcacatcctgcacagccctaggtcccttaaaccttgatttcatacaacacatgtttttgtgagctccaagttgggtcaaagtggctgggtcaaagtggctggggcaaagctacaaattaacaacatctcagcaaagccattgttcaaagtacaggtctttttcaaaatggagtctcttatgtctttcctttctacatggacacagtgacagtctgatctctctttcctttccctacatatattcatggaccacagtcttcaaggagtccatttcctcactgtttttggtttgatttctctgaaattaggaaatgccccattgaggcacccaggattgtctttacttcccccagagcttccactcctgaggcaggagcttctcaaacaccccccaagactcaacacctaatttcaccctctgaaaccttcccatttcttaaatccaggcagggtcatggtccttagcccctcagatgctgtggagaccttctttccctttcatacattctctcaagattaaaagccacccctcctcagcacacaccccagagactcaccccaacatgcattgcaaatcaccctggaaacagtcataagaccacactcatttaataatattttatttatcaaaagacactctttctcaggtaagtgaagttctggagaggaaaagaggagtcctgatgtaaattgccctgcaggccttgctgagatcacaaggagattgttactgcagcttgtagcacaatagtaaatttcttctctggatggaagttcaacaatccagatcgtagtatattccttttcattatgctcagtccagcaaatgtgatgataacaaattccttttcatgatcatccattcagcagagaaaatgtttgtaaatgtgttttcatgaagatgtttaccataacatacaggatttaccattatcaatgcatccacaaactctgctgttgttttttatacataattttttccatcgagaagtgatagttgtacatattcatgctgttcatatttcaaccacaaactctgctggtttttttatacgtaattttttccattgagaagtgatacttgtacatatttgtgctgttcatatttcatgtttcatcatccttttacaataaataggttatattgtattttaagtttttctaactgtagtgcagaaattgtactgggtgtatacatagatatcaaaccaaatttacttgttctggctgataatgcatcatttatttcatagattatgtatttctttgacacatttcacgtacaactaattgcataaaaatgaattttcttttagtatagacatcagcatgtgcttaattcggaatttaattgttgagttaaacatcgtcattgccttttccgttgttattaattgctctggtgggaattttgttatctcatacataagacagtgtgccacaatatctcttaaaatttcaatggcaataaactttatatttaaaaacagggaatctatggaaaacacatttttttctaaaggattaaaatatttttttaaaataattttctaaaaagttaggcacggtagcaaacgtctagagtcccagctactcaggaggctgagacaggaggattgcttaagcctacgagttgggggctgcagtgaactgtgattgcaccactacattccagccagggcaatagaagttaaccctttttctaaaaaaaaaaaaaaaagaaagaaagaaagaaaaaaagcaacaacaccaaaacctcaccaacaaaatggtaaagaaaaaaaaaacagcaatacaatgtaagctatttgatccaaagaagtcaatgaaatttaaaacaaatgaaagggaaaaagtaatacttgagtcctgcaggactcagtccaagttctgctgtgcctccctcacggtgagccacccctttagaagtcacttgggtcataagttaacccgataggaagtgtcctggccaatgaactagggaggtggtaaatggcaccattttaaatttaaattcacggccttttcaacggatcagtagccatgttgggtaagagtgcaaatgtcagaggtgaaaagaggcagcaggaccctcccctagtgcttgggcaacagaaggtggaatcactaaggggacaagactttagcatgctcaagtacacaggacagaaaacatgctttttacaaaagctggtaaatatgaagagggaacattttcaagttcctgtaaccaagaactaccgcctgtaaccggtgaaagtgactttctatggcaaaagcgtttttgaaaaggtgaggaagttaaatatcttaatgttgggaggttcttctggtttatctggctagaccctaatggaatcccaagtgtccttatggagcggggagcagagagagagatttgagtccagacgaggaagaaggtgatgtgagtctgggtgcgggacagggggagaatgatgctatgtggggatctgggctggggaatgacttagctgcatgagcggagtgacttagactcctgaactagaagaaatctagggctcatcacctcagcagccctaaccatcaaccttatttttattacaggtcttccatcgacggactccctaaaaagccagcggcgtggaggggcgccctctattggacaaatagatcttgactactttcggccctcaaatagcctgactaggcaaataacaaataataataatttttttttaaatcatggaaaatattttaaaaaacaattaaaaagttataaatctataaaatctgcttctgtctgtgtgtctgtatatttagatgtctcatgtgtacataatgtttcactaccaaaatatatgatgaaaccctcattaatcggcttagaaaactaaacacctaaatattttctcagaaaatacaaaaactttaactcaaatcccttttaattcacctgactttaaaaatctttaaaaaataaagcatgctttaaaattattagtaaagtaaaattagaacatcttcagaatttagacatttggtttaaattatacaggtcaaatactgcccttagtaaatattttcaggtcataaacaactcctgtaatcttttaaataattgaattacatgtctgttttagagctttaagttctagctaaagcctggggacaaatgaagggcaccatgccccctctctgtgctggaaagagacattttctacagctctgacccttgcagtaggctttgcaactgctacctatcaaaattgcctacatcctaagtttattattaaaaggagttgcttggagttaacattataatgaatatatgtaactaaaactatttctcatacaaagtatatgaaaaagtagaatgtatttttaataaaaagttataaaaagacatgaacatgtagtttttataaaaaacagtaattttgtctagttttgcagttctaaaaagttatgttaaattcaaaaataaaaaataacaagacaagactcaaggtttaaataagttgtaaaagatttgtaaaaattagttctataaaaattttacaaaaaaaagcattggttaaaatttaaggaattattttgtttttacagaaattaaacattcattaaaaacactctgatacaaggccttaatttgggttcatgtatcagaatagcagggttttcttagaatattaatctattctttaaaagaactatgaatgttatgcaaactttataaaaatcttaccttagagtcaaactgattaaaattccatagattttacgtaaaattttattaaaaattaacttcaacaaaaataaaatttgattttctcctttaaacaaaagttttgcgtaatattaaataataaagcatttttgtttaccttttaaactataaacacacacacacatacacatacaccaacactaaagtcagctgacctcatactgtctttattggatattcttgtttaaaaaactatcttctttggaaaataaagttttttattttaaaccatattttaaattatcattttgactaaatccataacatacagtgatctgtaataattctattttataatatcaagtgttttgaagaactccaggaacagccatgagagaacactgtggtttagtaacactttatttcctcagtttgaaaatagttgtctttcttggggaggccggtttcagcagatgaaaacaagagtcatgatgaaaattacccagcagtggttagtgtgaccataggaacattgtcatcaggtcagcagaaaacatatcagcaaatttttctcatactggcagtgtgtaggggtggatgtttacagttcctgaagccccagtggtcgtgtggtcttttagttttgccatttataggcaacttgtggtaactagctcaattagacacattccttatcacaaggacagagggctttctgtatcctagggttcttgccttggcattccagaagaatcaggtcacacgtggacgtggagaatgagtgcaaggttttattgagtggaagtagctctcagcagatgggggagccagaaaggagattggtttctccctggattggggccgttcagcagccctggctctcctctgactgccccaggcaaaatccacatcgttctataagtcggtgccctgctggtgtgctggtgcctgttgtcatgttcctcttcatgtccagccgcctgtgtgttcctccgctgatgtgctcctctcgacgtcaagcctcctgtgtgtctgactgctagggtcttggggtttttataagcacaggatgggtcttagcaggccaggatgatcttgggaaagacaacattcggtcaggaaaacaaaaatgcctgttgtcatctaggtccgtggggacaagcccaggtgtggagcttttagccagggaccacagcctcctgtatccaacacttcccttcaccttttctatatcattcaaagggatcatgcccttcccatcccagcacttcactttcatgtcatttgccccctctgaagaggtacatctaactgccattagaatatggatgatgaccagtcttagctgcttcctgctgaaagggggcattgttttgggggaaaacggcagtcagattcctcccaggggtctctataataaaagatcgaggtggctactttcaggaggtcctctaatgtactatctggtcccaagtcccatttctgcaacctcctcctgatgtcaggagctgcctgagtaataattttatcctttaggattatctgtccctcgattgaattaggagatagagaggtgtgatttaccaaggcctctcttagcctctccaggaaggcagtgggattttcatcaaatccctggttaattatggacaacttagtataattgagaggcttggtcttagacctacgtaagccctctattatgcacacctgaaagtgtctcctcttccagtcttccatctcattattgggatcccatttagggtccttcactggtgctacttctcttccagttggataatattcgctcccttccctgatgctataggtgatgcaaagctcatccccaaatctctctgctgctggcagagcagcctgcttctcagtgtctatcaggttctgactcaaaagtaacataacgtctctccaggagagttcaaatgttagggtgaaattctggaaagcttctatatatctatcagggtcatctgaacacttgcccagatctcccttaatttgctttaagtcttgtagggaaaagaggacttggaccttactgggcccaaattcactgggcatctgtaggaggggcaagagtgagactgggcttgtttgggatgaagatttctaggaggggccaggtgagaggctgaagctggatacggaggttggggtggacccagaggagcagggcttgagggagctggcacgtcagctgggggtgcgtctgggactcgtgtctttaattccctgggcttgaccctggcagccttccccgagacagcaaacaggagggctggaacaatcctacatgtcagcaaaggtctggattgctttgcaaggtatagaaagcctgcacatttggggcctcagaccatgtgtcctcacatccagagaaaagttctaattgcaggatggtattgaaatgaatggtcccttcctgaagccaagccagtccttcctgtaaaccataatttggccaaacctatgtgcggagggctatgagatgcttttcctctggattctgagggtcaaaacagtcccaatggttcaggatacactcaaggggagtacaagctgggggtggtgaggagaactggctgcccattctgaaagacagggaatagaggtgttcctcatttcccttccttcttttggcaaaaagctcagggtgtgatggggagggaaagcaagcatcttcacttcactttccacctcttacccctgcgccctggcaaccttggcaggtgccggccacaggtacaaatgcggtatgtacccatgaagcagggagaacctggagattaggaattaactgccctcacctatgtttccttttctccctgctgttgaaaaactttgagttccctgggcctttttatcccatgaggcatggcctccttctgtgggatggggttcagtcagcaggaattggtcctgtccatttacattgtgcctgttgcctggctttgaattcctcagacctgctttctctttctagggcctcagcctgaagcttggaattgagtttgggactgaaaaagcatttcagaggctgtttatatccatttagtgcctcaaataagccctgctgaatttgcaattatcagccagcaggggtcactcctctgttaacttccctattagaaacagagcggtggggattctcacttagaaaagaaaaaaagagaaaaacagttaaagaggcaaaaagtggggaatgctgggggaagaaccccttgcttagtgcaagtgggcccctctaatccttataactttcccatccttcccccagttcagaccaggttgaattccttggccatggaaggaaaggttccattgatgcagtgggtgagaagcactctgtagggtcctggctaccatcggttttctcacacccccctcatcccaggcagtggagggagacacttctgcgacattgctccccctgccccttcatggctattgggtgtggcctttgcctgctgcaggcatgcctaggtgctggagctgggagggaaaagggtaaggagaggtgccctggaagccgctcatgcctggggctgtcaaggtggaggcatacatggcacctctaggaaaaattggtctgatttgcacctttggcggctgagccaaatgctcattttacttagtaacattgcctcagcctgtagcaaaactcttaacattataaaggaagagataagatccatttcaaataatgtgtgagagagaaaagagatgaaaggaaaacagagtcttttacctgcaggaaagggagagaagtggcagagttttggaagaaaggcaggcccaacagtttcccattcactcacactcaccttccgagatcccagacgagccaccagttgaaatgggaaaagtttccttgtccccctcacaggaggtggagtgggggtgtggcttgcttctttagtactccgctgctcaaacctctagggaagcatacagactggcaagttgtggggctacaaccccatggcagcatctaggggtagatgtttacagctgctgaagccccagtggacatgtggtaccatgtgctcttttagttttgccatctataggtggctttgtggtaaccagctcaattagacccattccttaacccaaagacagagggctttctgtatcccgcggttgttacctaggtgtaccagaaaaatcaaatcacacgtggtcttggagaatgagtgcaaggttttattgagtggaagtagctctcagcagatgggggagccaaaagggagaatagttttcccctgaagtcgggttattcagcggcccaggctctcctctggctgccccagccaaactctatgtcaatccattggtcggtggcctgccagagtgctggtgcctgttggtggattcctctcagcgtcgagagtttttccctctcaggaaagggagagaagtggcagccacccatgtgttcttgcactgatgtgctcctctcgacgtccaacctcctgtgtgtctgcctgctagggtcccagagtttttttaggcacaggatagggcatggtgggccagggtgatcttgggaaatgcaacatttggtcaggaaaacaaaaatgcctgtcctcatctaggtccaggggcacaagcccaggtttggagccctagccagggaccccggcctcctctacccatcactttccttcaccttttctgtatcattcaaagggaccatgcccttcccttcccagcacttctcttctgtatcaataggtgatgtttttaaaatttcccaactctagtgcaggcatggtactagacatatacatagaaataaaaccacacttattcttctggctggcaagacatagtatttttgccaaattatgtgttgttttgaagcattttatgtacccctggtcatataaaaataaagctattttgttcagtacaaacagcagcattttctggattagaaagttaatcatcttaaaagatcatcacggatttttccattgcactcatcactaattgctttggcaaaaaatttcttatctcacgcatgacaaaatcagccgcagtatctcctagtaatttaatggtgatgatctttataaaggaaataagcacatcaagggaaaacataattttttttaaaaaaagagtaataaaactttttaaaagtcttttttaaaagactgcttttctaaaatagtaaaataaaactccaccaataaaaccaccaacaaaacagaaaagaaaaaataatgatatgatcggagctatttgatgaaagatggtaaattaaatttaaaatgattagaagagaaaaagcaatacctgtctcccgtaggtctcagtccaggttctgctatgcctttctcctggtgagccacctatttaagagtcgcttaaagcatatgttaatccaacaacagcagattaaaaaccaatgcaatctgaactatttgatctaaaaacataaataaaatttaaaacaaataaaagagaaaaagcagtacctgtgtcctgtaggtctcagtccaagatctgctctgactcccttgtggtgagttagccctttagaagtcacttggggtggggcatatgttaattccactaacattggttctggccaatgagtcaggaaggtggtaaatggcaccttttcttcttgctgatttctttcagttcctttggagtctggacattagtcctttgtcagatgcctagtttgtgactactgtttcctatactgtgggttgtgtgtttaccctgctgatatttcttctgccttgcagaagattttcggtttcattaggtcctattgatcttattctatttttatatttttgcgtttgcttttggggcattagtcatgactacttggcctaagccaatgtctagaaaagctttttggatgctatcttgtagcatttttagactttcaggtcttagatggaagtttttatatgctttgttaaagatcaggtgactgaaagtaccgggctttgtttctcggttctctattctgttccattgctctatgtgcctatttttatacttcctgcaccatttattgaataaagtgtcctttccccaattagtgtttttgcatactttgttgaagattagttgtctgtaagcatttggctttatttctgggttctctattctgttccattgctctatgtgcctatttttatacttcctgcaccatttattgaataaagtatcctttccccaattaatgtttttgtgtactttgttgaagattagttgtctgtaagcatttggctttatttctgggttctctattctgttctattgctctatgtgcatattttataccagtatcatgctattttggtgattgtagccttgtagtataatttaaagcctgccttcagatttgttctttttgcaaagtattgctttggatatgcggtcacgtttttggttttgtataaattttaggattcttttttctagttctgggaaggagaatgatgatattttgatgagaattctactgctctgtagatggctttggagagtatggtcactttcacaatattgattctacctattcataagcttataatgtgttcccatttgtttgtgtcaactgtgatttctttcagcactattttgtagttttccttgtaggaaacttacattaacctacttggttaagtatatttctaagtattttacttattaaaaattctcagggaaatgcaaagtaaaactgaggtgggaaattaaagaaaaataaaattaaaaagaaagggaaataagctttcttgtattaagctaacttgtcccagaggcagcaacaggcacagcccagacccaggaaaagtcttgataatattatttattgtattctggagactcttccagcactccttcaatgtagggagaagaaaaacaaattttcctttgttttatggtatgagtttatagattcttgttctctttaactagtaacttcaagtattctgttttatctaagaagtatggcaaaggtcatgagaagcctgagcaggcctgaactacagctctctaggcaccatagtgaagataaaccaatgcaagcctctttagagcaaaacctagataatagacatctgggttgcatagcaacagttatgtgcaatcctgagttatgaacctgttacaatttgattaactgtctttttcctgcctctgtatccctgctttcacaccactgtaagcttgcttcaagctggcccacccccttttgtgaagtgtgtataaaagtcaagtgctgtctttgttccaggccctgtctttggacgtgagtctgctgggcctgagagcactcaataaaagattctcctgttttaacccaaagcctctctctcatcctcctaaatcccacaacaaaaccacaatgagatgctatcttaatcttgctagaagcccataatttaaaagtcagaaaacaatagatgttggcatagatgtggtcaaaagggagcactttgacactgctagtgggaatttaaactagtccgaccactatggtaaacagtatggggattccttaaagaactaaaagtagaccattcattccagcaatcccattactggctatctacccaaaggaaaagaagttattccataaaaaagacacaagaatatggatgtttatagcagccgattcgcaattgcagtgatatgggaccaacttaagtgcccatcaacgaacgagtggataaagcaaatgtggtacaccatggaataatacttgataataaaaaggaacaaaataatgtcctttgcaacaagttggatggaactggaagccattattctaagtgaagtaactgaggaatggcaaatcaaatattgaatgttttcacttttaaatgagagttaagctatgagaatgcaaaggcataagaatgatataatggacttggggactcagggggaaaggttgggagggggatgaggaataaatgatgacatattgggtatattatacactgctcaggagacagatgcctcaaaatctcagaaattaccactaaggaacttttatccacataaccaaaaaccacatatattccacacactattgaaagaaacataaacattattttaaaaaataaagccacttttaaaattagcaaaataaaataaatatgtcttcagagtttagatattggatccaaattagacagatcaaatactgcctttactaaatattttcatgtcattaacaacttctaaaacctttcaaacagttttttgacatgtcttggaaccatccatttctagctaaggcctgggcacctgtgaaatagggccatgcccccccttatactgggaagagtaagatatttcaagactaagatgttttctacagctccatctttttctttaagctctacatcaaggacataattaaaattggttgtctcctaagtggtttactaaaaatgcatacttaagagttaccattataattaatatttgtatctaaagctacttaaaaattttcacacacaaatctgactgaacaagtaaaatatattttaagtcaaagtttataaaaggacatgagaacatagcttttatgaaaaaattagttttgtcaagtttagaggttttcaaatattttaaattcaggaaataaaataacaaaaagacaaaagaaaatggttgaacaacttagaaaaggtttgttaaaattcatcttataaaacaatctacatgtaaaaagtgggctaaaatttgaaagagattatttaggttttccataaattaatccagaaggggtaggaagtcttaagaatgaggaaggacaggaggaaggggaggtcatcctgacactgcagaggcagaagtgcagctgaaggtatgaaggctaagaggggaggggagtttgagtgctgctgcctggctgtcagagcagaggagggtcctgggcaccagacttgaggaagggatgaaaatgctgggcagacctgtagtgggcccttgagatggcagatagtggtttccagagagagggccattgttttccagtgcccagcactgagcagagagagttttgggcagtgtaaaaaaaaaaagagaacttacctctttctcgttttagaaaaagaacagtctaagaatatcagcagggaaactctcagtgcttcaaggggttaaacgcccttttggctttcttgtgttggtttcatcatagaggaggagaaacttcttggaagtgttcctaaaaacacaacacgtctgcttctcctttcaaaaaaggaagtgctaaaacacgaacactctagatccaaatattaatacggatgtctaaatgcttccgttttccaaggggcagaaagctaaaggttgtaacctattcatttcagtcaaagttggtgaaagggaagcaaaggaactgggtggggcttggaaggatgacgaagctcaagctcattggccagcaacctctctcctgggggcgggaggggtgagcatacgtcattgctttggcttctataaaatgaggaggactcaccgagtgtgaagagtccttctggtgattgcagctgagagcacactcacgacgttctgcaaggattctctgattatgattctgaagggaaaagcgatggaatggacagcagagattgtaattttctttatcttgaattacggaagaaagtatctaggacagaaatccacgacaagtccttggaaccagcagatctcttcgttcacggagacgttgacgtattctctattgaagaagattcttaccttcttactggacaaggttttgtcagttctgcgtgactggattgtccgggagactctgaggaaactgatgtcacatgtttttccaaagaagatgtttctggaaccaacaactgtgattgtggtttgaggacttctgagagttccagtacaggaaataagcagaacatcagctggaggctaaacggatccagacttcactcttcacttcccttcctattcagtctattgtgcctgctgactgagaagcttggctggtatgtgagcaaataaacggaactattcagaaggagatgttgacatattctgtattgaagaagatccttatcttctcacctgacaaggttttgtcagttctgtgtgactggattgtccggaagactctgaggaaactgatgtcacatgtttttccaaagaagatgtttctggaaccaacaactgtgattgtggtttgaggacgcctgggagttccggtatgcgaaataagcagaacatcagctggcggctgaagggatgcagcctccactcttcacttcccttgccattccatctattgtgtctgcctgactgagaagcttggctggtatgtgaggaaataaacggaattataaacaaggagattgtttctcatctacttcattctgttgtggcttttctattttggggttcagggtgtgtgacaaggaccaaggagatgaaaggtttcatgatggagaaagcccaggcaatcagattgaagagctatccacagggaatcttggctgctgaggggctgcaccctgcaacggactgaccatatgacagaaaagggttttaaaggctcaacttctggactgagaacccagagtaatttgggaacctcctctgtgaggagatatgaaagctgggaatcatgacatccctaggaatggaaggcacatttcctgatggaaggggtgctttggaaaacaggagcagagtagacacagcagccttgtggatacgggtgggcagcatgcatgggtgatgtgaacgtggagtgtttgtgatcgaaactcaaaatgtctgacaaagtgaaaacctagaaaccacaatgaggaggaagagtttgtgagggcaatcactctccccatgtgtgaaaatcgggggctcttaaaatctcatctggagaggtgcagtctaccaaactctgggactttagcctccccttttaaaaaaccgtgcatcaataccaacgtccgaaaccacagaaataacacctggcttgcatggagacaaggacaaaaagccgtcatgatgagttgttctgctcacttgctgcctctgttcagtgcacaggatattgtccacccactagcaggctactgcaagagaagtgtgcaatatgttccctatgtgccatatatgtgccatatggcccatatgacaactgagtcagaaaatatctgatgccctcagagttacactccacctggagcttgcccccagccatccaggacctaggctccctaccctgtccaattttctggtgttttgggggcttcattctctaaggtgtgcccactctttactcaaaccaaaacacccacatattcctgcccatgaacaaccaatcaaccacttctcagttccacatcctgctgttgggtctctagtggtgacactgtaactcccaggtcatagtggtgacactataacacctagctaaattgatgccttgtctctaggaggccatgggctcctgcaggtctcatctgactctctgtagccttccctgacaatgctcacaatacccaagccagagccacattgacagcaagctgctctcatcttacctttgccagacctggccactggaaaaggctgaccctcatcctgcaatgcctatacctccaacctttgtctcaagctggtgtcctggagggacttctaagcagaaaacagattcagactcccatcctctcctgaatggcctcatatccaattctcagaccctcagccttcattgtaaggacacttcatccatgcccttgagtattctgtctgcactgtgtattctgcaatagattctcctccctctgcgaccctcaactccttccgcagactttttgttttcttgatcatctaccatagtcttccactgggacactgccaagcccattctggagagtgagttgtgcaagtacactgccccccatctacctttcgggaggtgtatacacccttctttctcccaggtctggaggctttctattttcatcctgaggcatctccacctgctcttggattcttcaaattgacaaccaccagttaacaagaactatgtgtcaccaaatagccaaacaatggcaattacaaaaataaaattaatagctgtaacccccattagcaaggatacacaaatcaaatcagggatagtgggtgaggaagtctgcctaacattcaaggaaggattctgaagtgatacaaaatcattgcctttgctatctttagaatggacactttcagccaggcacagttgctcagcctgtaatcccagcactctgagagccccagttgggtggatcacttgaggccagcagcttgagaccaccctgggcaatgtgcagaaaccccaactctactaaaaatacaaaaatagccagttattgtggcacatgcctgtaatcccaactccttgggaggctgaggcacaagaatcacttgaatctgggagccagagtttgtaatgagcgaagatcatgccactgcactctagcctaggcattagagtgataatctgtctgtggaaaataaaaacattcctcttcaaagttttcttctttaaatcataaatgttggaattaatatatcctctttgaaactcactttcttcaagcttctttatttgatggtagtaaatctttgttaagctttatgaggcaagagtaatggaagaagcatattatatatatttatactctaacctcagtgcttgttctagcaagctcaggcatgcgtgaatgtgcccaggcatgttccagcccataccttatatcctttccttattgggaaatgctgttactcctataagcattcttgtaagcaacttcctctttttctttgtctccactatctttacctattgaggacagttttaggttcttagccagttggatgtagcatagactgtgaggtccaaccccagccaatggagatagcacacagcagtagcgacctcatgcttaacagataaatattcctgtctccctttgtttggggtgctctcagctgatgagcaacaccctttctaaagaaattaaagttgtcttgctgagaaaacttttggtctaaatgctgattcttccttgcagcactgaagaagaagcaattatttccaacactttctcatacacaaaaaaagaagaaggtggaagaaaactttcttgtgcaccctatccctcactcagaaagacaacagaaggctcctagtggcaagccctagaggattcatttcttttgggaaccctcttggctgggatactaggactcaggtcaaactcagcattttcagtgtgtgggaagtgtgcttgggtttcactgttacttccaataatgtgatttggtccttggggttcaccaaattttggtatggagtggtgaaccctgttaagtttaagtgtctataaaattaacaaagcaaaataaccattctgccccatggttcagagaccaaatattgtgtaggaaatgctttagcgagagaaacagagaagaataaaaaatgtcctcaagcgctgcattatttcttgttatcgtccagatcttagaggaaaggctttcattttccctcattcagtatgatattagctgtgcatctgtcatttatggcttttattatgttggggtatgttccctgtgtatgtagttttttcagggtttttgttatgaagtgatgttgaactttatcaaacgtttttcagtttcagttgaaacgatcatatgctttttgtccttcattctcttgatatgatgcatcatgttgatgatttccatatggtgcactgtccttgcatcctgggcatgaattccacttgatcatgacaaatgaatttttaatgcattcttgaattccgtttgctggtattttgttgaggatttttgcatcaatattcatcagagatattggcctgcagtttctttttttttcttttttctttgttttgttgtttgtttgtttgtttgttttgatgtgtctatgtctggttttggtatctgggtagtagtgttccatccccttttattttttagaataatttgaataagactggtgttggttctttaaatatttggtagaattccgaagtgaagtcattgggccccgggcttttctttagtggaaggctgtttattatggcttcaatctcgttacttattattggtctattcatgttttgaatttgttccttatttaatcttggtaggctgtgtgtatctaggaatttgtccatttcttttagattttcaaatttattggcacataattgcccattgtagcctctaatcgtcatttgagttcctgcagtaccaattataatgtctccttcttcatttttgattgtatttatttggatcctgcccctttttttcttacttaggctgcctaataatttcttaattttgttgaactttttcttttgtttgtctcgctctgccaccaggctggagtgtagtggtgtgatcttggctcactggaacctccgtctcccaggttcaagcaattctcctgcctcaccctcccaaatagctgggactacaggcaagtgccaccactcccagctaatttttgtatttttagtagacacgggttttcaccatgttggccaggatggtctcgatctcttgacttcataatccacctgcctcagcctcccaaagtgctgggattacaggcatgagccactgcgcccagcctaattttgtttaaattttcaagaaatcaacttcttctttcattgatttctgtattttttatttccattttatttatttaaactctaagctttattctatcttcttctcattttagctttggtatgcttattgcctctctagctctttaatgtgcattgttagattgtttatttgaagttcttcctctctacaccataagacgtaagcatgtcctcattatgtcataagatgtaaccacttacagctataaacttccttcttagttctgcttttgctgtatctcataggctttgttatgttgtgtttccattatcaattgtgtcagaaatttttcaatatttttcttaatttcttcattgagcaactgatcatttgggagcatatttttaaacttccatgtacttacatagtttccaaaatacctcttgtgatcaatttctagttttattccactatggttcaagaagatgcttgatattatttcaattttttttcacattttaagatgtgttttgtgacctaacatatggtctactttttttttttattaaactttaagttgtggggtacatgtgtagaccgtgcagttttgttacataggtatacacgtgccatggtggtttgctgctcccattaacctgtcatctacattaggtacttctcataatgctatccctcccctaacctccaccctctgacaggacctggtgtgtgatgttcccctccctgtgtccatgtgatctatttttgagaatgatccatgtggattagaatgctgtggaaaagactttggattcctaatatccagggagggagacgatgatattactttcaatatcacacgggtgtacacactctctgtgacattgttcctaatatccagtggaagagaggatgatataacacccagggagggagaggatgatattactcttaatattgcagggtgtgtacccatgcctatgatattgttcctaatatcaggagggggagaggatgatattactcagaatatggcagggggtgtacacacactctgtgacatggttcttaatatacaggggagaatgggacaatattactctcaatatcgcagggggcgtacaaccctgtgatttgttcctaatatacaaaaggggacagtatgatattgttcctaaaatcgcagaaggtgtacaacgccctgtgatattgttcctaatatccagggcgggagaggatgatattacccccaatatcacagggggtgtgcactttccctgttacattgttcctatgatccgagtggggggaaatgacattagtcccaatatcgcaggatgtgtacactactcccccatgatattgttcctaatatcaagggggagagaggaggatattactcccaatatcgcaagggaggtacatcctccatgcaatattgttcgtaatattcaggaggagagaggaagatattactctcaatatcgcagaaagtggacacccaccctgtgatgttcttcataatatccagggaagcagacgattatatgactttcaatatcgctgggagtgtacatcccttttgggatattgtttctaatatccaggaagggagaggattatattacttccagtattgcagccagtgtacacatttcttgtgatattgttcctaatatccagaaagggaaaggatgatattactcccaatattgcaggtggtgtacacccccctctgatattgttccttacatcaaggaaaagaaagaagaatattactcccaatatcgaagagagtgtacacccctcctgtgatattgtatttaatatccatggggaaagaggatgttgttactcccaatatcgcagggggtttacacccacactgtgatattgttcctaaaatccagtgaaggagaaaataatattgctcccaatattgcagggtgtatacaggccctcccccgttatattgctcctaatatccagcggtggagaggatattactttcaatttttgcagggagtgtgtaccccctctctgatatttttctaatatcaaggatgggaaaggatgccattactcccaatatcgcaggaggtgtacatgccctgtgatattgttcctaatatccagggaggtagaggatgatattactttcaatattgcaggggctgtacaccctctatgatgttgttattaatatttaggttgggagaaaatgatatttttcctaatatcctgggaaggaaaggatgatattactgtaaatattccagggagtgtacaccttcctaatattctaatattgttcctaatatccaggggtgggagaggattatattactcccaatatcgcagtgggtgtacacccctcctgtgatgttgtttctaatatccaagcgaggagaaaatgatatcactctcaataccgcagggggtgtacaccttccccatcatatcgttcctaatattcagagggaaagaagatgatgttactttcaatatcgcaggggttgtacacaacccctgtgatatttctcctaatatccaggaagaaagaggatgatattgctcccattatagcagacggtatacgcctccctgtaacattgtttctaatatcaagactgggagaggatgatatcacttccagtatcgcaaggggtgtacacctcccccgtgatattgttactaatatccagggggaagaggataatattactttcaatattgcaggggctgtacacccccgtgatattgttgttaatatttaggttgggagaaaatgatattagtccaaatatcgcagagagtgtacacacttccgataatattgttcttaatatccatgggggagacgatgatattacacccaatatcgcagggggtgtagtctccccttgtgatattgtccctaatattcagggaagtaaacgatgatgttagtgtgaatattccagggagtgtacaccccctttgtgatattgtcctaatatccgcaggagagaagataatattactcccaatatcgcagggggtgaacacaccccctgtgatattgtttctaatatccaagcgaggagaaaataatattactcccaatgtctcaggggatatacaccttccctatgatattgtttctaatattcaggtggaaaacgggtgatattactcctaatatccaggaagaaaggggattatgttactccccttatagcagggggtatacacctcccctgtaatattgttcctaatatcaaggctgggatatacgtggggggaaggatgatattactcccaatatcacaggggttataaaaccttctgtgatattgctcctaataaccatggcggaagaagatgatattactcctaatattgcaggaggtgtacactcccccattatgttgttcctagtatgcagaaaaggagaggatgacattattgccaatatcgcagggtgtgtacaccacccatgatattgttcctaatatttagagggacagaggatgatattactcccaatatcgcagggggtgtacacgcatcccctgtgatattgttcttgaaatcgaggggaaagagaattatatttctctaaatattgcagagggtgtacaccgccccctgtgatattgttcctaatagccgggggcggggggagataattaaattactttcaatatctcagagagtgtacatcccccttgtgacattgttcctaatatccagagcaaaagagaatgatattcctcccagtatcgcaggaagtgtacatttaacctgtaatattgtttctaatatccagggggaagagaatagtaatactcccaatatcgtaggggttgtacaccttttctgtgatattgttgcaaatatttagaagagagagagaatattactcgcaatatcacagggaatgtatacttcccctgtgatattgttctaatatctagaaaaagagaggataatattactcctaatattgcagggggtgtacacccccacttgtgatattgttcctaatataaaggaaggtcgaaaaacaaacggggagcccagggggaaggaaggcaggcgaggaagaggcagcgccggggcgccggagggagcagccgggccgcggaagcgcgagcacgagaccggtcgcggtcgcagtcgcatttttgccgttgtcgcggccgccgccgccgaggcttacccggggatgtctgagcccgcgcctcgcggcccccaagctccacgctgcgcccgctgtcccggcctctaagggccgccacgtccctgcggcgcgcgcaggcagaaagcggcttcgtgccggcggagggggcccgggcgggccgggaaaggctgccccaggccccgcgcctaccccatcaccgcggccggcgccgggccgggaggatgagcggtgtggggctctgaagcatggagggggttttgtacaagtggaccaactatctcacaggttggcagcctcgttggtttgttttagataatggaatcttatcctattatgattcacaagatgatgtttgcaaagggagcaaaggaagcataaagatggcagtttgtgaaattaaaggtgacagctttggaggggaccacccttgattggatacataaattctgttcattcagcagacaacacaagaatggaattaatcattcctggagagcagcatttctacatgaaggcagtgaacgcagctgaaagacagaggtggctggtcgctctggggagctccaaagcatgtttgactgatacaaggactaaaaacgaaaaagaaagaagtgaaaccagtgaatcgctgaaaaccaaaatgtctgaacttcgcctctactgtgacctcttaatgcagcaagttcatacgatacaggaatttgttcaccacgatgagaatcattcatctcctagtgcagagaacatcaatgaagcctcttctctgcttagtgccacgtgtaacacgttcatcacaacgcttgaggaatgtgtgaagatagccaatgccaggtttaaacctgagatgtttcaacggcaccatccggatcccttagtttctcctgtgtcaccttctcctgttcaaatgaggaagcgttctgtcagccaccctggttcttgcaccagggaggagtagccactgtataaaagaaccagtatctgcacttcaccgactctcccagcgacgccgaagaacctactcagatacagattcttgtagtgatattcctcttgaagacccagatagacctgttcactgttcaaaaaatacacttaatggagatttggcatcagcaaccattcctgaagaaagcagacttatggccaaaaaacaatctgaatcagaagatactcttccatccttctcttcctgaagaaactgtagtgtccaactttctctaagtattgctatgcaaaagctgctgtaattgaactattgttatagggagtagttttttcccttaggactctgcactttatagaatattgtaaaacagacaaacaagaaaacaaaccacatacttttgaagcgtgttttatctttatatagtttgtttgcaagagtattttcctaataacttcacagtatgaatgtgcatcttttttttctttttttaacaaatgatggtgtaacattttgacatccataaggacaaatgtagatatttttctaaaaaaccgtgaggggactgacagcttggtcagggtgtattgtagcttataaacatgaaatcttacaaggtttcagtttgacagaagtgtgatatatgtaacttgtgccatggaccaaatggtcactttaccacagctaaaaatgagttatgatagcagcttgatggtgattgcattgtattcctttaatcaaaaaggaaacgcaatattctaagtatctttagcccaaataccatgacatattgagcatctttaaataaccagactgtattgtccttcatatgtgaagttgacactactgatttgtcaataccaaattttgggttaaagtgtttaatttttatttatttattttcttgttgcctcaaaagatgattgcattctaacttttgtgacctaccaaatttaagatgtgtatacattgttctttacgttgttctagaaaagagattttaatgctgtagtgacttagctcacttacatcagagaaataaacaactttcaatggaaaaaaatatatataaaggaaggaagaggatgatattacttctcatatagaaggggttgtacaccccccttgtgatattgttcctaatattcagggagggagaggattatattactcccaatatagcagggagtgtacacccccccccccgtgataatgttcctaatattcagggaagcagaggatgatattactttcaatatcacagggggtgtgctgtccccctgttatattgttcttaatattcaggggggagaggatattattatgcccgatatcacaggagaagtacaccccacaagtgatattgttcctaatatccaggggtaaagaggatgatatcgcaggtggtgtacacccctccccgtgatattgtttctaatataaagaaggagagagcatgatattactcccaatatcgctggaggtctacaccccccttgtgatactgttcctaatatccaggaagggaaacaatgatattgctgtgaatattccagggggtgtacacccctttgtaatattgttcctcatatccagggggtagagaggatgatattactcccaatatcgcagggggtgcacggccccactgtgatattgtttttcatatccaggaggggagaggatgacattactctcaatatggcagggggcgaacaccccctgtgatattgtgctagttaggttgggagaaaatgatattactcccaatatcgcagggggtgtacaccgctcctgtgatattgttcctaatatccatgacgggagaggatattactcccaatatcgcagggggtgtacctctcccctgtgggattgttcacagtatccaaaagggaagaggatgatgttactcccaatatcacagggagtgtacaccaccattgtgatattgttcctaatagccagggaagaaaacgatgatattattgtgaatattacagggggtgtacacaccccctgtgatatggtttttaatatacaggttggaaaaggatgatattactcccaatatcacaaaaggtgtacacacccccccatgatattgttcttaatacttcggtggggagaaaatgatattagtctccatatcacaggggtgtgaactcctccggtgatattgtttttaatatcaagaggggaggagatgatattgctttcaatatcgctgggggtgtacatccctcctgtgatattgttccttatatccaggcgaggggaaaataatattactcccaatagtacacaccccatgtggtattgttcctaatactcagggggaaagaagataatattactttcaatatcacagggtttgtacacctttcctgtggtatagttttcaatatccagggggaaggtacatgatattactcccattgcagcaaggggtgtacacacctcctgtgatattgttcctaatatccagaagtggtgaggatgatattactcccagggggtgtacaccccacctatgatattgtttctaatatccaggggaaaagagtgtgatattatgcccaatatcgcagagggtgtacacttatcctgggatattgtttctagtatttggggagggaggagaggatgctattattctcaatatcgcagaaattgtacacccccgctgtgatattcttcataataatcagggaaaaagaggatgatattactaccaatattgcagggggttacacttcccctttggtagtgttcctaatatccaggaagaaagaggatgatattaatcccattttccaggaagtgtacacccaccgtgtcatgttgttcctaatatccagcagggaagaggatgatattactcccaatatcggagagggtgtacacttcccctgttatattgtttctaatacccagggggaagaaggatgacattactgccaatatcacagggtgtgtaccccaccctgctattgttcctaatattcaaaaggaaagatgaaaatattactcccaatatctcagggtgtgtacacctctcctgtgatatcgttcctaatatccacaggaagagagaatattactctcaatattgcaggggggtgtacacccccctgtgatattgttccaaatattcgggcggggagaggatgatattagtcccaatatcgcagggggtgtgcaccaacctgtgatattgttcctaatatccatgcgggggaggacgatatcactctcaatgtcgcaggaagtgtacacctctcttgttatatttttcttaatatccaggagggaaaagatgatattactgccaatatcgcagggtgtgtccaccccccttttatattgttcctaatatccaatggaaaagaggatgacattgctctccatatcccagaaggtgtacaacgcccctgtaatattgttcctaatattttgggggaagagaggatgatataacttataatatcacaggaggtgtacaccacccctatgtattgttcctaatatcctttaagggagaggatgatattactcccaatatctcaggtggtgcctattccccctgtgatattgtttttaatatccaggggaagagagtatgatattacgcccaatatcgcagggggcatacaccctctctgagatattgttcataatatatagagggagagaggatgatattacttccaatatcagaggtggggtacaccccccggttatattattcttgatatccaggaggggagaggttgatattactggatatatagcagggagtgttcacatcttctgtgatactgttcctaatatccagaaaagtagaggatgatattactcccaatatcgcagaacgtgtacacctccctgtgatattgatcctaacattcaaaggggagaggatgatattactcaaaacatcacagggcatgtacactcccctgtgatattgttcctagtatccagaagggagcaagataatattactttcaatatcgcagggggtgtacacccctctttggtatgtttcctaatatccagaaggaaagagggtgctattactttccatattgcaaggggtgtacacccccctgtggtatggttcataatatccagggagggaaagggtgctattattccccatatcgcgaggcatgtacaccctgctgcggtacggttcctaatatccagggggaaagaggatgctattacttcccatatcgcggggtgtgtacacccccgtgtggtatgttttgtaatctccgggaacgaagagggtgttattacccctcatatcgctggaaatgtacactcccctgtggtacggttcacaatatccaggggattgagggtgctattactccccatatcgcggggggagtgcacctccctgtggtatggttcgaaatatccagggtaagagagggtgctattattccccattttgcaggaggcgtacacccctctatggtatgttttgtaatatcccaggtaaggggtgctattgagagaagagagcaaaagaccccccccatattgttctgtattattttatactcagtacctgttttaagaagaaacaaggaagcgaaaccaaaggcaggcagcccggcgccaggcaccagatccaaaaccagacccgaaaccaggcctgggccttcctgaccttagcctgaaagttaaaattcaacccatgacctagcaactgatgttatccatagattccagacattgtatggaaggacattgtgaaatttcttgttctgttctgtttcactctgagtactggtgcatgcagcccttgtcacatacccactagattgctcaatcaatcatggccctttcatgtaaaaaccttagtgttgtgagcccttaaaaaggacagaaattgtgcactcaacaagcttggattttgatactctagtctgctgatgcttccagctgattaaaagccacttccttcactacctcggtgtctgtgggattttgtccgcggctcctcctgctacactgtgactccccttatagagaggggtgtacacccccctttggttcctaatatccagcgggggagtaggtgctattactccccatattgcggggagtgtacacccccttgtagtacggatcgtaaaatcaaggagggagagaaggtgtaattatccccatatcacagggagtgtacacccctttgtggtatagtttgtaatatccacgacgggagagaatgctattactccccatatcgtggagggtgtacaccgccctgtagtatggttcgtaatatccggaaggggagaggttgctattactccccatatggtgggaagtgtacacccccatgtgatatggttcataatatccaggggggtagaggatgatattacccacaatatcatagaaggtgcacacccttttgtgatattgtccataaaatccagaaggggagaggatgatattacttccaatatcacagggggtgtgtagccccatatgatattgtttgtaatatcaaggtagggagaggatgctattccttacaatagctcaaggggtgtaaccttcttgtgatattgtttgtaatatccagaaggggagaagataatttttttattttaaaagtaaactttaatgtcaaaaatgcaaacttgagaagggcagaaagatcaaacagaaggctgccacttcacaattggagggttgcacagtggccgggcagaggcgctcctcactccccagacggtgaggcagccgggcagaggtgctcctcacttccgagatgttgcaggagccgggcagaggtgctcctcacttcccagaacagggggctgccgggcagaggtgctcctcactgcccagacggtttgcaggcctggcagaggcactcctcacttcccaaacggagcagcggcaagccagaggcgctccacacttcccagatggtggggcagccgggcagaggcgatcctcacttctcagagggtagggcggcccagcagaggcgctcctcacttcccacatggtggggcggcaggctagaggcgatcctcacttcccagacggtggtgtggccatgcagaggtgctcctcacttcccagatggtgtggccgccgagctgaggcactcctcacttccctgacagtggggcggctgggcagaggcgctcctcacttcccagacacttggactccgggcagagactctcctcatttcccagatggtggggctgccgggcagaggcgctcctcacttcccagacggttcagaggccgggcagaggcgctctggggagaggataatgttactcccaatatcgcagggggtgcacactccctgtgatattgttccgaatatccagagggggaaaggatgatatagctcccaaaatcgtggggagtgtacacccccctgtgatcttgtttgtaataccaagaagaaaagagaatgctattatttccaatatagcagggggagtacaaccccctgtgatattgttcgtaatatctagggggagagaaaattatattagtcttaatatctcaggggacgttcatccccctgtaatattgttggtaatattcagaatggagaagatgatattgttcttaaaatacaggaaaaaatatgataatattacttccaatatcgaagggggtgtacactctcctgtgatattgttcccaatatccagaatgaaagaggatgctattactcccaatatcccagggagtgtacacccctttgccatattgttcataatatccaggggaagacaggataacattactcccaatatcaccgggggtgtccacccactagtgatatttattgttcatcatatccagaaaaggagaggatgatattactcccaatattgcaggtggtgtacggtccctgtgatattctttgaaatatctagaaaaggagaggatgatatcactccgagtatcacagggggtgtacacccccctgtgatattgttcgtaatatccaggggagaaaaggatgatataattgccaatatttcaggggatgtgcacctccctgtgatattgtttgtaatatccaggggtggagaggatgatattactcaaaataacgtaaacatcctgtgtgtacatcccctgtgatattgtttataatatccaggggggtagaagatgacattacccccaatatcacagagtgtacacacccctgggatactgttcataatatccaggcgggaaagaatgaactacttccaatatcgcaggatatgtacacccccctgtgatatatttcctaatatttatgtgggtaaggatattacccccaatatcacagaaggtgtacatcctctttgtgatattattcctaacatccaggaaaggagagaatgatattactcccagtatcgcagggggtgtacaccacccctgtgatattgttgctaatatccagggggagaggataatattactcccaaaatcacaggggacgtacactcctcctgagatattgttcctaatattcatggggaaaagaatgctactactccaaatacagcagagggtgtacaccatccccgtgatattgttttttatatccaaagggtgaaaggctgatattactcccaatatcgcagggggtgtacaggccccccatgatatcattcttaatatccagggaggcaaagaatgatgttactcccaatattgcaggctgtatacaccccccgtgatattgttcctaatatccagagtaagagaggatgacattgctcccaatattgcaggggttgcacgcacgccctgtgataatattactcccaatatcaacagtgggtgtacactcctcctgtgatattgtttgttatatctaagaaagaagaggatgatattactgtcaatatcacagaaggtgtacagccccttgtgatgttgtttctaatatccagcggtgagaggatggtattactcgcaatattgtagggggtgtccaacggccctgtgatattgtttctcatattcaaaaaggaaaagaataatataactccaaatatcgcagggtgtgtacacttccctgtgatattgatcctaatatccaggaagagagaggatgatattaatcccaatatcacagggggtgtacatcgcttctgtgatattcttcctaatatccagggggggaggggatgctattactcttaaaatcgcagggaacttacactcccactatgatatttttcctaatatccaggaagggagaaaatgatattactcctaatatcacatatcacaatgggtgtacatctccccgtgatattgtttctaatatcaaggatgggagaaaattatattactctcaatatcgcagggggtgtgcacacctcctgtgatattgttcctagtatccagcggaggagatgatattactttaaatattgtagaaggtgtacaacccccctttgatattgttcctaatatccagggggaaaggagatgatattactcctaatatcgcaggggctgtacaaccctatgtgatattgtttcttctaatatccaggggtggagaagataatattactcctaaaatcgaaggggacatacactccccctgtgatatttttcctaatatccagaaggaaagaggatgatattactcctaatattacaagaaatgtatacctgtcctgtgatattgttcctaatatccagaggggtaaatgattatattactcccaatatcgcaggggtgtacaccttccctgagatattgtttctaatatgcagtggaggagaggatggtattactcccaacatcacaggagatgtaaactccccttgtgatattcttcctaatgttcaggacgaaggagggtaatattactcactgtattgcagcagggggtgtagagccccctgtgatattgtttttaatattcaaggttggagaaaataatattccttccaatatcgcatggggtgtacacccttctttttatatagtttctaatatctggggggagaggatgatattactcccaatatcgcagggggattacacccccactgtgatattgtttttaatatccagggtgggagaggataatattactccaaatatcccagggctatacaccctccgtgtgatattgtttctaatatccagaggaagagaagatgatattactcccaatgtcacagggtgtgtacaggccttctttgatattgttcttaatatccatgagggagaggatgatattactcccaatatcgcaaagactgtacaccctttctgtgatattgcttccaatatccagggagggagaggatattacactcaggatcacagggggtgtacaccccaacctgtgatattgtttctaatatctagggaaaatgagggtgatattactatcaatatcacaggaggtgtacactcccttatgatattgttcctaatatccaggagaatgacaggataatattactcccaatatcgcgggtggtgtctccccccactccgtgatattgttcctaatacccagagggggagagaatcatattactcccaatatcgcaggggatgtacacctacatccggcggagtagaagataatattactcacaatatcgcaagaagtgttcaccttccctgttatattgttgctaatatccagggagtgagaagatgatattactttcaatactgagcgtgtacactacccctgtgatattgtttctcatatccagtagaggagaaaatcatgttactcccaatattgcaggggtgaacacctcctttgtgatatttttcctaatatcaggaaagggagagtatgatattacccttaatattgacaggggtgtacacccccctttgatattgttccaatatccaggggggcagaggataatattattcccaatatcgcagagggtgtacaccccccgtgatattgttcctaatatccagagaaataaaaaatagtattatttccaatatcacagggcgtacattttccctgtaattttgttcctaatatctggggggtggggtggcaggataatattactctcaatattggagagggtgtacacccccctgtgatattgttcctaatattcagggtgggagagaatgatgttactcccaatatctcaggagtcgtatacacccccttgtgatattttttctaatatccaggaggcagaggatgatattgctcccaatatcgcagggggtatacacccgagctgtgatattgtttctaatatgcaatatgggggaaggatgattttactttcaatatcgcagggaatgtacactttccttgtgattttgttcctaatatccaggggtggagaagatgctattactatattactcctcatatcgcaggcggtgtacaactccctgtgatatggttcagaatatccagagtgaaaaaggagggtgacattactcccaatatcgggggggtgtacacccctttgtgatgtggttggtaatatccaggggggcagatgagggtgatatcactccccatatcgtggaaggcgtccacttttttgtgatgtggttctttatatcccgaggggagaaggtgatattactccccatatcgcgaagggcatacacccccctgtgatatagctcataatattccggagagtggaggaagatactatgccctatatcgcgggtggcctacaaccccctatggtttggcttataatatccaggggggagagggtaatattgctccccatattgtggagacgtacagccccctgtgatatggtttgtaatatctttggggggcgagggtgatattactccccatatcgcggggagcatacacccccgtgatctggttcatagtatctcaaaggaagaagttgatgtgtacaacttaagggaaaaagttgaagtgaagtgtacacacgccctgtgacgtggttcataatatccaggcgggggagaggagagtgatatttactccccatatcgcgggtgttgtaaactcccctgtgatatagttcataatatccaggggagagaggagggtgatattgctcctcatatcgcgaagggtgtacaaccccctgtgatatggttcataatatccagaagggtagaggacgatgatattactccacatatcttgggaggtgtgatatggttcgtaatatccagcgatgagagaatgatattactccccatatcgcaaaaggtgtgatagggtttgtaatatcctgagggggagagggtgatattaatccctatattgcagaaggactacaccctcccatgacatggtttgtaatatcccagggggtagagtgtgatattactttccatatcacagggggtgtgatatgattcgtaatattcgaagggggagagggtgacactactctccatatcacggggtgtgtgatatggttcttaatatcccaggggttagaggttgatattaccccctttttggggggtgtgtacaccccctgtgatatggttcgtaatatcccgggggagacagggtgacattattccccatatcgaggggatcgtacaccccctgtggtgtggttcataatatccctagggggagatggtgatattactccccatatcagggggcgtgcactcttctgtggtataattagtaatatccagggggcagaggtcgatattcgtttccatatcatgaagggagtacacttccctgtgatatggttcctaatatccaggggggagagggtgatattattccccatattgcggggggacatacaacccctgtgatatggttcataataaccagaaaagaagagggtgatattaatccccgtattgcagagggcatacaccccccctgtgatatggtttgtaatatctaggggaggaaaaggtgatattactttccatattgctgggtgcagacacccctttatgatatggttcataatatccaagttggagagggtgatattacttcccatatcatgggaggtatacccttccctgtgatatggttcgtaatatccagaaggggagagattgatattactccccatattgtggggggcgtacaccttcctgtgatacggtttgtaatatctaggggatatagtgggtgatattactcaccatatcacgggggttgtaacatggtttgtaatatccaggggaggagagggtaatgttactccccatatctcggggcatgtacaccctcctgtgacatggttcgtaatatccaggtcgggagagggtgatattactcctcatattgccgggggtgtgttatggttcataatatcctggggaaggaggctgctatcactctccacatcttgggggatgtacactctcctgtgatatggttcataatatccagggtgggtgagggtaatattactccccatatcgcgggaagtgtacatacccctgtaatattgtttgtaatagaagagagggtgatattactccccacatcgcgggtggtgcccacccccctgtgatatggtttggaatatccagggggatgaggagggtgatattactccccatatctcggtgggagtacatccctctttgatcaagttcataatatccaaaaggaaacaggagagtgatattactccccatatcgccgggggtgtacacgggagggggagtacacccccggcgatatggtctgtaatatccagggaaggagaggagggtgatattactcaccatatcgcaggtggtctacatttacctgtgaaacagtttgtaatatccagggggggaaatgagaatgattttttttttttgagtctcactgtgtcacccaggttggagtgcagtggcacgatcttggctcactgcaacccccgcctcctggactcaagcaattctcctctcccagcctcctgaatagctgggactacaggcgcaccccacaacgtctggctaatttttgtatttttattagagacggggtttcaccatattggccaggctgatctcgaactcctgaccctgtgatccatccgcctcggcctccaaaagtgctgagattacagatgtgagccaccacgcatggcccaaggagaacgatattactccccatatcccagggggtgtatatccccctgtgatatggttcagaatatccggaaggaaagacagggatattacttcccatatcgcaaggggtgtgacatggttcgtaatatcccatgggggagagggtaatattactcttcgtattgtgaagggcatacactcccctgtgatacagttcataatattccggggagtagaggaagatattatgctccatatcgcgggtggcataagccccctgtggtttggttcataatatccagggaggagagggtaatattactccccatattgtggggacgtacaccctcctgtgatatggtttgtaatatcccagaggggagagagtgatattactccccatattgcagggacatacacccccctgtgatatggttcaaaatgtcttttttttttgaaggactggttctttatttcaaaaagacacttgtcaatattcattatcaaaacagttgcactattgatttctctttctcccaatcggccccaagtagaccacatcaaaggagagtacatattaagccaataagctgtaggatgtacacctaacagacctcctagaaaccttaccagaaaatggggacagggtagggaaagaaactttaaaagatcaacaaactgccagcccacggactgcaggggctgtcacagccagatggggtggccagggtgccacaaacccaaagaagcaaagtttcaaaataatataaaatttaaaaagttttgtacataagctattcaagatttctccagcactgactgatacaaagcacaatgagatggcacttgtagagacagcagcttcaaactcagaaaagggtaatgagatgagtttcacatggctaaatcagtggcaaaaacacaatcttctttctttctttctttctttcaaggaggcaagaaaagcaattaagtgctcacctcaacataaggggaacatgatccattctgtaagcagttgggagggggtagagatggaacaaaattttggtctcagaggtcttgccatcttaatttggtcacttctaatgaaaaaaataaaaaatagaaataacattatccaaaggtatcttaaagctgaaaacttgaacagcacattttttgttgttgttgtttggctaactcctcctggaaccacctttctggcttagctagtactttgtacagagcaatgaggcttcccatagtggagtctccctgggctctgtttggctctcagcaaggcaggcctataccttttcctctcctccatggagagaggaatatgcattaaggtgaaaaatcaccttccaaaagtgagaaagggattcgatcgctgcttcagggctgtggtattatatggaatgttttacaaaaggttgctacaaaacaacaaaagaggtaattacaaaatgtgtacatcacaacatactttttaaagacattatgcattgtgctcacattcccttaaatgttgtttccaaaggtgctcagcctctagcccagctggaatctccgggaagaggcggacagtttggtgaaaaagacacagggaaggagcgggcggcggaaggagggggcggcgaaaggagaaagcagccttccagttaaagatcagccctcaattaaaggtcagcttcgggcaggctggcctcaggcggagtctggttcagagggaggagcagcagcagggtgagactgaggcgttctacatctcattcaggtcaagcagagtctggtccagcatcctttgtgtacagaggtgctcccctttggtgcatttcagtttatcttccaagtcatcaattgtcttttccagcttggctaccgatctctcagcaaactcagcatgggtctccgcctcctttattttatcagtaagaatcttgatctcttcctcatatttgtcttctttttgagagtacttttcttcagcagcactcagacacttcaggttctggtccatcagtctaatctgctcatccatctctcggcaaagggattctgccagctcagctcgttcctctgtgcgttccaagtctccttcaatgatcaccaacttacgagccacctcttcatacttcctatctgcctcttctgcaatgtgcttagcttctctgagttggatttcctggagttccatcttttcttcatcttttaaggcccggttttcaataaccttcttacctctctcactctcatcagcagctttttccgcttcttccagcttttgcagggcagtagccaggtgctcctgagcacggtccagctcctcttcaaccagctggatcccacgttcaaggaggccacctcagcctcagcctgttcccgggcccacctttctccctcaacttctcgctggaggcgctcagctcgctcctctgcatcatctgcctgctgctgcagaacctggatcttgcgcttcaccgcctcgatggtggtgatcccagccatggtgcccacccagctactgctagagctccggttcctgcctcctccgatcggcgttgcagcctcctctcacccttacttccgcctcggttcaaaatatcttaagggaaggagttgatattactccccacatcacgggaagtttacatcccctggtgatatggtttgtaatatcccagggtggatagggtgatattactctccatatcgcgaaggagtactcccccctgtgatatggttcataatatccttggggggagagtgtgatattactccccatatcgcgagggccatatactcctttgtgacatggttcgaaatatcccggtgggggagggggtagagggtaatattactccccatacagcgaagagcatacgcccttctgtggcaaggttagtaatacttcagggaaaagagtgcaatattacttttcatattgcagggaacatacactcccctgtgacatggttcgtaatatcccgggggctgagagggtgatatttctccccatatcaccgggggcctacacctgggtgtgatatggctcataatatacagggagggagagggtgatattactccacataccgagtgaggggttacacaccctcgtgacatgttcgaaataccccaaggaggagacaatgatattactttccctgtcgcgggggctacaccctcccagtgatatggttcacaatatcccggggtggagagggtgatattactccctatatcaccggggggtgtacacttccctgggaaatggtttacagtatccccggggggagagggtactattactccccatatcacgttacatatcagggtacacccccacgtgatatggtttgtaacatcccaggaggaagaaaatgatattactccccatatcgcggtggcatacacccctccccgttaaatggttcataatatcttggggtggagagggtgatattactccccatatcacgtggggcatacaccccactatgatatggttcataatatcccggaggggagagggagatattactctccatgtcgcggggggcatatacacccctgtgatatggtttgtgatatcccgggggcggagagggagatattactctccatatcgtggggtcgtacacttttctgtgatatgattcgtaatatccagacggggagagggtgatattacttcccatattgcgggggcgtacacccctctgtgatatggttcataatatcccgaagaaaagagggtgatattactcctcatatcgcggggaacacacaccaccctgtgatatggtttgtaatattcagcgggggagagagtaatattactccctgtatctcggatggcgtacactcccctgtgatatggttcataatatccagaagaaaagagggtgatattactccccatattccagggaatgtacaccaccctttgaatatggttcgtaatatccaggaggggagagggtaatattgctcccaatatcgaaggaggtgttatacggttagtaatatccagagaaggagagggtgacattactccccacatcgtggtgggtgtgcacccacctgtgatatggttcataatattcaggttaagagaggtgatattgctttccatatcgccaagggtgtacactcccgtgaaatacagttcgtaatatccaaaaggggagagggtgatattactcccatatcgtggggggtgtacacccctctgtgatatggttcataatatccagggtggaataaggtggtattactccctgtatctcggggcatgtacatcgcctgtgatatgattcataatatccagaagaagagagggtgatattaatctccatattgctgggggtgtacaaccccctgttgtatggtttgttacactgagttggggagagggttacattactctcaatatcgagtggggcatacacacttatgtgatatggttcataatatcccagggaggagagggtgatattactccccatatcgcgggaggcatacaccccaatgtgatatggtttgtaatatctacatttttttttttgagacgaagtctcgctcttgtcccccaggctggagtatgatggccggatctcggctcactgcaacctcagcctcccgggttcaagcgattctcctgccttggtcccccaagaagttgggattacaggcgcacaccaccacgcccggctactttttgtatttttagtagagaaggggtttcaccatgttggccaggctggtctagaactcctgacctcagatgatccacctgcctcggcctcccaaagtgctgggattacaggcgtgagccactgcacctggcctggtttgtaatatctatgaagggggaaggtgatattactttccatatcacgggaggcgtacaccacgatgtgatatggtttgtaatatccagggggtatactgggtgatattactccccatatcgcggggagtgtatacccttttgtgatatggttcctaatattaagctgaggagaaggtaatattactccccatatcgcaggggtttttatatggttcataatattcaggaagagagagggtgacattactctccatatcacggggtgtgtactcccccatgtgatatggtttgtaatatccagggaaggagaggttaatattactccccatatcgcagggggtgtacacctctctgtggtttgtaatatccaaagggaagaggatgatattatcttcaatatcttggggggatacagtccccagtgatattgttcataatatccagagggggaggggatgatattactcccaatattgcaggtggtgtacaaccccctgtgatattctttataatatagagggggatgatgatattactcccaatatagtaaacaacctgtgtgtacaccccctgtgatattgtttataatatccaagggtggaaaggatgatattactcctcatatcgcagggggtgtatacccctctgtgacattgttcctaatattcaggggaggagaagatgatactactcctcatatcacaggggatgtacacccccctgtgatacttttggtaatatccaggggaggagaaaattatattattccccatgtcacagagggtgtacaccccgctgtgatagtgttcataatatccaggtgaaaagaggatgatattactccgaatatctcaggaagtgtacacccttctgtgatattgttcataatatccaaaggtggagaggaggatactactccccatatcgcagtgggtgtacacccccctgtgatatggttcataatatccaatgtaggagaggatgatattactttccatatcgcggagagtgtacatccccctgttatattgtttgtaatattcagggagaaagaggatactactactccccatatcacacggggtgtatattcccctgtgatatggttcctgatatccaagagatattataatcctctcttggattatgctacctctcatatcgcatggggtgtacacacactttgtgatatcgtttgtcatatccaaggagggagaggattatattaatcccaagatcacggggggtgtacaccctcctgtgatattgtttgtaatattaaggggggagaggataatattactcccaatataattaacaccctgtgtgtactcctccttgtaatattgttcataatatccaatgggggagacgatgatattactttcaatatcgcagaggatgtacatccctttgtaacaatgtttgtaatataaaaggcaagagaggatgatactacttccaaaattgcaggacatgtacaccccccggtgatattgttcctaatatccagtggggaagaggatgatagtagtcccaatatcgcaaagggtgtacacaccccctgggatattgttcctaatataaaaggaggagaggatgctattattcccaatatcacagaaggtgtaaaatcccctgtgatattgttcgtaatattcaggaggggagaggattatattactcccaatatcacagggtgtgtacacagggaggggcaagggccagaagcgggcgggaatccccatgtttgggcggacccagtttctaatggccagcatttgccaatcaaagcttaccagagaactctaaaagccagggctttcctgctagacaagactcatttctggaactgctttaaaaagaaacaaaacttcccaaggaccccttttcctctctgtctgcctaaaataatgttttaaaaactcctaaagcagctgaattcagcccccttcctgggggaatgtatagacggaactcccacctttcccggcatcccaaggccagagtatgtgaaactcctgggtctctatgtgtgtctgagcggctgctctgccaacactccacacagccctgtgtcctggacccaaggcccttatgacctgagctcaagaggggatctcctgatccatgggttgcaaagatccatgggagaagcatggtttctggggcggggtcacacgctcagtcactgtttccctcggatgccggagatggttcctttggctctctgccaatacagggtgaatcatcatccatccctcttttctttgttctcccgggtcaagttgtttgcctagtcagtcccaatgtgagaacctgaatatttcagttgacgcgctgacttcaaaatccccgggcttcgggaggcggagcttgcagtgagccgagatcccgccactgcactccagcctgggcgacagagcgagactccgtctcaaaaaaaaaaaaaaaaaaaaaaaaaaaaaagtccccgggcttttcttttcactcagtggaaggcagctgcttctaattggccatcttggcccgcccccaccacgtgaccttctgtaaaatgcctccactctccaggaacgctctcattatataactttgcctgaaaccaacagcacgctcattgcacatatcatgggctcatttatttcacttataaagaacctggccaaggaagagatagtgcctaaagtggccagtattctgaccgatatgttagaaaaatggtgtgccgaccaattcatgacatgtgtcccaaaactagcaacggaaattgtattcgccgtgttgaggtctctaatccagatgatgctcatctatgtactggaaaaggcagagtcctttcctgacaagctgctgaaactcttcagaaacatctcatatttcctgaagaagatgatgtctggacaagcagcacaggtcgttcagatttaactttctattcatatatccagcacgatattcgcacaattgtcacgaaaccttaccagttgatgagtcctgcacatttcctttaatttcaggaggaagagggtaatccggatgagttttctgacctactctgctgctgtgattaaacaaccaccaggaaattttgacgacactgttctcctgagctcctccctttcctccgggaacaaaacaattgaatttacaaaaataaagtgttatttgactggagtgaggtctcatgtctgcttatgcggtggctcgctgctcagaacagggtgagtctctgggttgtgtgctgaggaggggaggctctcaatctggagaaaacccactgcaggggacacctccatggggtctgagggactgaggatgaggagccggactgggtctagggaaggaggaggtttcagagggtgaaattctggcactaaagcctgggggtgtttgggaacttcctccttccgaagaagtttcagggagggataaagacaaaccctgggctccttgaggggcccttactaatttgagaggactctatcgggaaggagagtgacaatggcctccttgaggactgaggcccctgaataaatgaggcccagatacagtccatgggggatgagaccttcaagggtcacattttggttgggacagaggaaaagtgcagctctgcagccgcagaggaaaacccggcagtgtgaaagcgaccttggaggggccctgtgcgctctgaatgcgtctgagcccccatcccctgtccccgcctctctttctggattcttccagctcggctgtctccgccatcttctgagcgctccaccctgacttattcaagtttcccttctgccttccaagtactccaaaatctttcagatctgtgtccctacccctgtttttagcatgtgttggggctccaggtccctgaaggtttctggcctgaaatccacctccccagcggagtggactgcgttctagagactccacactccgcgaggttcccaggcccctgagggacaaccgagtggcctgcgcacttcagggctccacactcggcaaggtctttcaagcccttggggtccccttcttagttttttccacctttctgggctgcagtcactccataaatgctgggatctgatccccacccccactctcgtttcctcaattctgcgggctacacgctctggcaaggtcctccgggccctggatcccctccctctccctatgcccacgctcctagtcagcccttctggggtccactattttcaggaactaaccgttctcatggagccttgctaaccggaaagctgtgtggaagaaaggctttgaggatagaggtggagatttggctcttccatagtgccactcacccaccccaccatgctgccactgccagacccggacccctgtttcagaacaagtgaccagattcgctcctggacagccctggacactggccttttctctgaaaactactcaccctttctctagtccccacttcatgccagcctcataccctcttccttcccccacgctggcttccgggatcctcctctgctcagacaacctcttctgtgtcccacccccgtttttagaatgctttggggcaccaggttgggggaaggtttctggcctgatatccatctctttccaaactcccttcttcccttgaaaggcttcttgccttcagccccacttctggctccgaggtttcaggacaccctcctcttcatcctcattcttttgaccaccagctttttaggaattcgaacgtccctctcatcttcgtgaatcctgtccaggcatttgttgaccccttcatctgatacccctgacctcacattgccaaaagtctacccctacccagtacactggaattagacaaaatcccaggagttttacctcaactctgagtgtgcccacaggagctctccctgaagccacgtccttttaagcagggtctagggttcctcccttgtcttaatgaactctttgtcacacggaggacgttatggagcccttatgatctttcactgcctttctgcccagcgttttgtctttccatggacatttataatattttccatggacattttgttctctcaatgtccacccctaatttccaacatcccaaagattctcatgtgtttcctgaaagccatttacaggaatggctgtgcccagacccccttccccaggatcctccttcacacctggtaggtgcctctcctagagagatttgcactcagttgtcgtgcagtcacatggcccagatggttgttaatcacccccttcctggcaacagctagcagccagggaatcactggcacagaaacctcagggtgaccaagatgaggccacctctgtgctgaaggctgtgctccagagcctgcttgggatcaggcttaagcaggtcttcagccagacctgatgttacctggtttccttgagctgccctgcctgagctatcgggagcactccctcaatgcacatcttgattccctatctcatgctctgcttctagaaaccatgagctatcaattgctactggcaatggtcctgggaagtcaaccctaagtatggattctggggttggatgactccccacaggacttcagtgagcaacaatcactgctggcagttggaggacagagtcgctagggcatgtgaccactgtgaaaccaccgatgtttcacctggggtaattttggatgaactacggtagaagcactgaaggtacattgcttttggtttggaagattgtaggtaaataatagcgatatgaatgtggaattggatggctgcaaacgagtgccattgatgcattgaaagaggaaaagtcaggctgtcacctgtcactcagcaatttaaagtgtgagagttgggactagatgtggtggctcacatctataatccagagattcgggggaagcttgaagaggtaggatcttttgagtccaggagttccagaccagcctggacaccagagcaagacctcatctctacaacaaaattttcttaaaaattagatgggcttggtggcacgcacctgtacttgtagatctagctaatggggagcatgagataaaaaaatcacctgagtcagggacttaggggttacaatgaggtatgattgtgccagtgcacacactcccacctggccaacagagtgagattctgcttccaaaaaaataagaaataaatcaggtttgagagttggaaagcatcatcttctcctagagccaaaggacatgtacaactgagacccaggaacaaagcttcatcacaaagagaccatcatcagtggagccgggagatgcattccccctcaccctgccttgaggaggcagtggagtcatctgtctgggatcctttctgacccagccctatttgtttgtctctttggcttctttggatttgtatattttagctgttataacactgtaaaacaaacagagtgatttttttgagttgtgtgaatgatgctagctccatagtcaccctgagagtgatgggaacttttgaatttgtggcaagttggagggtagtgtaagtgacctgagattgccaaattggggctagcactggatgtgaggttaggctagtggaaaaatatgcccagaaccagaggagtgtgggctcactgcaggtggttaggctcagatccaaattgtacagatggatagctttggggtaaagaataacatagttgagaagtgcatgtgttagtctgttcatgcactgctataaagaattacctgagactgggtaattatttataaaactcaggtttaattgggtcatggttccacaggctgtacaaaaagtatgatgctggccatcagctcaacttctggggaggccccagaatagttagagtcatggcaaaaagtacaagggaagcaggctcatcttccacggccagagctggagcaagtggtaggagaggtgatacacactttcaaacaagtaggtcttttgagaactccatcaccggacagcacctatgggatggtgctaaattattcatgaaatatccgcctccataatccactcaactgtcaccagcgcagccagccccacctccaacagtggggattacaattccatatgaggtgtgggtggggacacagctccaacctcaatcagtgggcatcctggattgggtctactatagaaggagaaccaggagctgactatgatcttgaaccctacccatgatggccgggcggggtgactcatgcctgtaaccccagcactttgggaggctgaggtgggtggatcgcctgaagtcaggagttagagaccagcctggccaacatggtgaaaacctgtctctactaaaaatacaaaaaattagaccggcgttgtgctggatgcctgtaatcacaccactacgctccagcatgggaaaaaataccaaaacttcgtctcaaaaaaaaaaaaaaaaaaaaaaaaaaaaagactgcccatgaccactgcaccagtgagagggacaccagcatcactgagatgcaagggctggacattcttcataggtcagagctcaaagcaggggacactgatacagagatgggctccatccatagcaccaaagtggtgagaggatgtgggaatggcagaggccagcactttgccatcaatgcaagggggtataaggaggtgacaccagtgccagagtacatcacggggggactgccctacaatatctaggacttacctcttagagcgtgtttcattagcgacaacagatataaatggcagacaggtgtgtccctgcattaacaggaaatagaaatcatcaagaggaacagaaggcagatgtcagcagccccttagaaagtcatcatccttcatacagttaaaatctgagacagttctcacacgagaaggcctaactcaaaaagaggctgggttctcatgaggcaggtttatgcaaaaccaaggaaggtgtacaagtttggaattctccagtttcccttggaaaagacctacagtcatttgcttaggtaactgagcactgaacaaaggtgagtattgttgtcttttagaagctcttggccaagaaggccttgttggcataaaacccatggtttggaaacatcaccatgacccctgttagagtaatggcctaagggtgggggtcaggaaattgatgtattccttgccaacttctgcctctaagtgagtgaactctgtttgtgaacctctctcctctgtggttatgttcctaggctctcatgtataatcaggagtcatagacttagaaacaggaaaaatacttacagtgtttttgtggcctgtgagctatgacttataattttaggaaaaaaacaattgcaaatggaaagcctaagtctatcaatgctcatccaagacaacataatcaataaaaaccaatatcaaatctcaaggcaaattatttcctgtatatagatggcagagatgagcaccaccatcaaaaactcaaggaccagtgctgtgggtccagtcatctgtttcatggaattcaccagtctggtatcttcaaaatccagaaggatgatggcagatggcaggaaagtaatgcaaacgtcatcaggtgtgaccccactgtagcagctgtgatggatgttttctctcaccatagcaataaataacacaacctcggtcacactgtatgcattgttggtctgcaaaatccatgttttgcaaaactcttcaggaaggtggatctgtaatattggcattgacatgagaacaacagcagtatttattcacaatctcaagctctctgtcttcccgtctctctcattagccatccaagtagtcctgaggaaccaagcccatcagaacattctgcaacataatacacagctccattctccattcaaattttgttgttgttgttgttgttgatgagacaacatcttactccatcagccaggctgacgtacagtggggctatctgggctgactgtagtcttgagcttccaggctcaaggcatcctctcacctcagcctcctaagtggcttgaactacagacacacagcgacatgctgggctagtttttgtatattttgtagagacgtgctctcaccatgttattcaggctggactcaaactcctgagcgtaagtgatccaagcaccttggcctcaaagtgctgagattacaagcctgagccactgcacccagcccaatctccattctactgataacaatgtcattaccaggtctgatggacaggaaatggtaaggtttctgaaaacctaaggatcacacagcgagttccaaaggctgaaagtgcatacctgtcgacactgataccaatgacatccaatggtgagaatgacattccttgtagtcctagctctgctcataacaaatctatactgaagtgtaagagtttgatggtcatggggattttccatgtctctgcctttcagcgatgtgccatatctgtgaagtgttcagaaatgcaacagcctgaggcatgctgggcatatcctctaataaaaaggaaaatgccattttatggtcctgtatttctacaagttggaacacatgggcctgtgatccagatgggggaaatgggaatattcccactcattcaccttcatccacgaagcccatttgaaagctttgggcttcccatccttgtagattttagtgttgtgggctgggtgcagtggctttcacctgtactgccaacactttgggaggcctagacaggtgaatccactgaggccaaaagttcgagaccagcctggccaagatggtgaaaccccgtccctactaaaaatacaaaaattagcaaggtattggggccagcacctgtaatcccagctgctcgggaggctgaggctggagaatcgcttgaacccaaaaggcagagactgcagtgacccgatcctgcctttgcactccacctgggcaagcagaacaaaacttctgtcttgaaaaaaaaaacaaaaaacgaacaaaaaagatgttagagttctgggtttagaggtctataccccagaaagagaatggtttcaacaagggacaaagaagttgctttaaacgttgacttgccatttcttttcagtgtgtttgttctcttgcgtcaagagaccaccagaaaagtggtgcaattactctcctgtcaagaatcattgactatcatctgcaagagggtcagatcctggtatataattagggcagaaatacttagtctgagaagggtatgacatccagaggccctattaatgatgtccttttctccatgcctgactctgaccccatgtgctggactgcccctgtgtggatggcctcatggcctgctcggactctgaggtcccaccccaagtggcacctccatggagggctctactcttgtatgggctctgacactcacactgagacactctcccatggacacctcttcacccacttggggtctgaaactgggctactccatccctccctaacctggaacagagagctttcactgctattacacaagtcatagaggctaactcctcatttttccaagctaattattgaaacattagtcctgggttgataagacaagataagttaacttttcataaatttgcttatcaagttttgaataaattcaaataaattcaccttccccacacaccttagttgtcgacatcacacgcgcacccatactcacagggtgagcacgaaggcttcactgtcagtggagaaagtggcaaaacccttctgtgcctcatcctggtctagacctggccctcatcctttcccactcttcccctcactcccttggattcatccacactggcctcctgcctgctgctccacctccctgcgaagctcacccctgcctcagggcctttgcacgtgcagtggcttcaagccatatcctcttcacccagatctcccagatctcctgaatgatcttcttttatcattcaggtctcagcttgcatgtaatcttctcagtgaggattacccaaaccacatagttcattcattcattcaaatattcattcaatggcatattgacaaagcagctacttcatgccaggccttgggccaggtgttatggatatggcaacaaacaaaacaagagttttctgctctcaaatttttacccacttaaaggagatatcatacatcatctgtaaataaatacatcatctgtaaataatgatgtaaataaatacatcatctgtaaatctgtaaataatgatgtaaataaatacatcatctgtaaataaataaagtataataaaagaaaatagtaggtttttttggttggaggtgaccgtgaagtttgcaaataccatcttacaacacattattttattttatttcatttcatttttaattttattattattatactttaagttttagggtacatgtgcacaacgtgcagatttgttacatatgtatacatgtgtgaagttggtgtgctgcacccattaactcgtcatttagcattaggtatatctcctaatgctatccttcccccctcccccaccccacaacagtccccggtgtgtgatgttccccttcctgtgtccatgtgttctcattgttcagttcccccctatgagtgagaacatgcggtatttggttttttgtccttgtgatagtttgctgagaatgatggtttccagcttcatccatgtccctacaaaggacacgaactcatcattttttatggctgcatagtattccatggtgtatatgtgccacattttcttcatccagtctatcattgttggatatttgggttggttccaagtctttgctattgtgaagagtgccgcaataaacatacgtgtgcgtgtgtctttatagcagcatgatttataatcctttgggtatatacccagtaatgggatggctgggtcaaatggtatttctagctctagatcactgaggaatcgccacactgacttccacagtggttgaactagtttacagtcccaccaacagtgtaaaagtgttcctatttctccacatcctctccagcacctgttgtttcctgactttttaatgatcgccattctaactggtgtgagatggtatctcactgtggctttgatttgcatttctctgatggccagtgatgatgagcatttcttcatgtgttttttggctgcataaatgtcttcttttgagaaatgtctgttcatatccttcacccactttttgatggggttgtttgtttttttcttgtaaatttgtttgagttcattgtagattctggatattagccctttgtcagatgagtaggttgtgaaaattttctcccattctgcaggttacctgttcactctgatggtagtttcttttgctgtgcagaagctctttagtttaattagatcccatttgtcaattttggcttttgttgccattgcttttggtgttttagacatgaagtccttgcccgtgcctatgacctgaatggaaatgcctgggttttcttctagggtttttatggtttgaggtctaacatgtaagtctttaatccatcttgaattaatttttgtataaggtgtaaggaagggatccagtttcacctttctacatatggctagcctgttttcccagaaccatttattaaatagggaatcctttccccacttcttgtttttgtcaggtgtgtcaaagatcagatagttgtagatatgtgacattatttctgaggactctgttctgttgcattggtctatatctctgttttggtaccagtaccatgctgttttggttactgtagccttgtagtatagtttgaagtcaggtagcatgatgcctccagctttgctcttttggcttaggattgactttgcaatgcggggtcttttttggttccatgtgaactttaaagtagttttttccaattctgtgaagaaagtcattggtagcttgatggggatggcattgaatctataaattaccttgggcagtatggccattttcacgatattgattcttcctacccatgagcatggaatgttcttccatttgtttgtatcctcttttatttcattgagcagtggttttagttctccttgaagaggtccttcacatcccttgtaagttgggttcctaggtattttattccctttgaagcaattgtgaatgggagttcactcatgatttggctctctgtttgtctgttattggtgtataagaatgcttgtgatttttgtacattgattttgtatcctgagactttgctgaagttgcttatcagcttaaggagattttgggctgagacaatgggttttctagatatacaatcatgtcgtctgcaaacagggacaatttgacttcctcttttcctaattgaataccctttatttccttctcctgcctaattgccctggccagaacttccaacactatgttgaataggagtggtgagagagggcatccctgtcttgtgccagttttcaaagggaatgcttccagtttttgcccattcagtatgatattggctgtgggtttgtcatagatagctcttattattttgagatatgtcccatcaatacctaattattgagagttttcagcatgaagggttgttgaattttgtcaaaggccttttctgcatctattgagataatcatgtggtttttgtctttgggtctgtttatatgctggattacatttattgatttgcatatattgaaccagccttgcatcccagggatgaagcccacttgatcatggtggataagctttttgatgtgctgctggattcggtttgccagtattttactgaggacttttgcatcaatgttcatcaaggatattggtctaaaattctcttttttggttgtgtctctgcctggctttggtatcaggatgatgctggcctcataaaatgagttagggaggattccctctttttctattgattggaatagtttcaggaggaatggtaccagttcctccttgtacctctggtagaattgggctgtgaatccatctggtcctggactgtttttggttggtaagctattgattattgccacaatttcagatcctgttattgctctattcagagattcaacttcttcctggtttagtcttgggaaggtgtatgtgtccaggaatttatccatttcttctagattttctagtttatttgcgtagaggtgtttgtagtattctctgatggtagtttgtatttctgtgggatcagtggtgatatcacctttatcattttttattgcatctatttgattcttctctctttttttctttattagtcttgctaccggtctatcaattttgttgatccttttaaaaaaccagctcctggattcattaattttttgaagggttttttgtgtctctatttccttcagttctgctctgattttagttatttcttgccttctgctagcttttgaatgtgtttgctcttgcttttctagttcttttaattgtgatgttagggtgtcaattttggatctttcctgctttctcttgtgggcatttagtgttataaatttccctctacacactgctttgaatgtgtcccagagattgtggtatgttgtgtcttttttctcgttggtttcaaagaacatctttatttctgccttcattttgttatgtacccagtagtcattcaggagcaggttgttcagtttccatgtagttgagcggttttgagtgagtttcttaatcctgagttctagtttgattgcactgtggtctgagagacagtttgttataatttctgttcttttacatttgctgaggagagctttacttccaagtatgtggtcaattttggaataggtgtggtgtgatgctgaaaaaaatgtatattctgttgatttggggtggagagttctgtagatgtctattaggtccgcttggtgcagagctgagttcaaatcctgggtatccttgttaactttctgtctcattgatctgtctaatgttgacagtggggtgttaaagtctcccattattattgtgtgggagtctaagtctctttgtaggtcactcaggacttgctttatgaatctgggtgctcctgtattgggtgcatatatatttaggatagttagctcttcttgttgaattgatccctttaccattatgtaatggccttttttgtctcttacgatatttgttggtttaaagcctgttttatcagagactaggattgcaacacctgcctttttttgttttccattttcttggtagatcttcctccatccctttattttgagcttatgtgtgtctctgcacgtgagatgggtttcctgaatacagcacactgatgggtcttgactctttatccaatttgccagtctgtgtcttttaattggagcatttagcccatttacatttaaggttaatattgttatgtgtgaatttgatcctgtcgttatgatgttagctggttattttgctcattggttgatgcggtttcttcctagccttgatggtctttacaatttggcatgtttttgcagtggctggtactgactgttcctttccatgtttagcgcttccttcaggagctcttttagggcaggtctggtggtgacaaaatccctcagcatttgcttgtctgtaaaggattttatttctccttcacttatgaagcttagtttggctggatatgaaattctgggttgaaaattcttttctttaagaatgttgaatattggcccccactgtcttctggcttctagagtttctgccaagagatcagccgttagtctgatgggcttccctttgtgggtaacccgacctttctctctggctgcccttaacattttttccttcatttcaactttggtgaatctgacaattatgtgtcttggagttgctcttcttgaggagtatctttgtggcattctctgtatttcctgaatttgaatgttggcctgccttgctaggttgcagaagttctcctgggtaatatcctgaagagtgttttccagcttggttccattctccccatcactttcaggtacactaatcaaacgtagatttaatcttttcacatagttccatatttcttggaggctttgtttgtttctttttactctctttcctctaaacttctcttctcacttcatttcattaatttgatcttcattcacttatatactttcttccacttcatcaaatcggctactgaaggtattgcatgcatcatgtagttctcatgccatggttttcagctctatcaggtcatttaaggtcttctgtacattgttttctctacttagccattcgtctaatcttttttcaaggtttttagcttccttgtgatgggtttgaacatcccctttagctcagagatgtttgttattactgaccttctgaagcctgcttctgtcaacttgtcaaagtcattctccatccagctttgttccattgctggtgaggagctgcgatcctttggaggagaagaggtgctctggtttatagaattttcagcttttctgctctggtttctccccatctttgtggttttatctacctttggtctttgataatggtgacctagagatggggttttggtgtggatgtcctttttgttgatgttgatgctgttcctttctgtttgttagttttccttcgaacagtcaggttcctcagctgcaggtctgttggagtttgccggaggtccactccagaccctgtttgcctgggtatcaccagcggaggctgcagaatagcaaatattgcacaacagcaaatattgctgcctgatccttcctctggaagcttcgtctcaaaggggtgcctggctgtatgaggtgtcagttggcccctactgggaggtgtctcccagttaggctagatgggggttagggacccacttgagaaggcagcctgtccattcacagagctcaaacactatgctaggagagccactgctctcttcagtgctgtcagatggggatgtttaagtctgcagaaatttctgctgccttttattcagctatgccctgcccctacagatggagtctacagaggcaggcaggcctcattgagctgcggtgggctcctcccagttcgagcttccagaccactttgtttacctactgaagcctcagaaatggtgaacacccctcccccacccagtctgccgccttgcagttccatctcagactgctgtgctagcagtgagcgaggctccatgggcgtgggacccactgagccaggcacaggatataatctcctggtgtgccatttgctaagaccattggaaaagcacagtattaaggtgggagtgtcccaattttcccagtacagtctgtcacgggttccctcatctaggaaaggtaaatcccctaaccccttgtgcttcccggtgacgcaatgccccaccctgcttcagctagccctccatgggctgcatccactgtccaaccagcccaatgagatgaacaaggtacctcagttggaaatgcagaaatcacccatcttctgtgtggatcaggctgggagctgcagaccggagttgctcctattcggccatcttggaatggcaatctatgtttgctttttacatttgaaaaaactggtgtcacgtacctaggtattaatcattgtggtatcctcttgccgatttacctctttatcattaactagtgaccctccttgtcttttgttgttacagtctgtgattttagtctattttatctaatatgagaatagctactctggcacttttttggtttccagcttcatgaaatatccttttccatttccctgttttcatttccctttcggtgtctctatagatgaagttgatttctttaaggcaccataagttgggtcttatttctttatccatttgaccatttagagaatttagaacactgtcagtgttattattcataagtaaaaacttaagagtgggtgtagtggtgtacatctgtatttcctgcactttgagagactgaggcgagctgatctcctggggtcaggagtttgagaccggcctggtcaacatgatgaaaccctgtctctactaaaaatacaaaaattagccaagcatgctggcatgtgcctgtaatccaatttacttgggaggctgaggcaggagaagcttgaacctgggagacaaatgttgcagtgagctgagatcacacagagaagtcatctccactctcctcatcagaacctcttgttcacagcatttgtgagcacaaatcaatgatggttattctttcctactaattagggatattttattacacagcaatagcctccagcaaagggaaccatcatacatgattcctacaagttgacagggctggaattatcactgaaaaactaaggtggctatacttgattcccaatgtccaatttttcatgaatagagaaatttatcctttttccccccagccagaaaccaagttttgctcttacgcccaggctggaatcaagtggcacaatctcagctcactgcaacctctgccccccagcttcaagaaattcaccttttgaacaaggagatattaaggatacactatgtgtatgctaccggtggttgcaggagactcagaaaagagagaaacagtcactggcctcgtgcaactgatattctcgggaggagagaaaggcaatcaagaaagaaacatgctgtatttcagacagctgtaagtcctccacaagaaaagaaagcaggtgaggaacataggaaatgtgtcaaccataaggttcccgctaattctataagttggtcagggatatcctccaagaataagcagcatctgagcaatcacctgaagggaggaaggaaggaagactgtgagtggtggcttacacctgtaatcccagcactttgggaggccaaggagggcagattgcctgagctcaggagttcacgaccactcagagcaacctgttgatacccaatctctactaaaaacacacaaaaaaattacccgggtgtggtggcacgcacctgtagtcccagcttccatgcccagctgatttctctctctccatatatatatatatatacacatatattgtttttgcagagatagggtctcactgtgtcacccagtcatcaagcaattctcttatactgttttggaaaagcatgggaattacaggtgtgaaataccctgctggtcctgaaaaatgtgatatttgggattctctgcctggcttgttttacccaaaataatgacctccagttccttccaggttgctgcaaaagacatgattttcactgttttataactgaatagtattcctgtatgtatacataccacattttctttatttattcttctgttgattgacatgtagggtgattccatgtctttgctactgtaaataatgctgcagcaaatatttgtgtgcattttgatctattcctttgagtaggtacccagtactgcaactgcaggactgagtagttgttatattttttgttctttcagaaatctccatagtgtttgccataaaatctgcactaatttacattcccaacaacaatgcataagatttccccttttctccacattctcactaacatttgttatgtttttgtctttttcataatacccattctgactggagtaagatatctcattgtggtggttgttgatatttttgagacggggtctcactctgttgccagactggagtgcagtggtgtgatcgtggcttgctgcaacctccacctcccgggttcaagcaattctcctgcctcagcctcccgagtagctgggactacaggcgcgtgccaacaggcctggctcattttttgtatttttagtaaagacagggtttcaccatgttggccaggatgatcacagtctcttgagctcatcatacacctgcctcagcctcccaaagtgttggaattacagtcatgaggcagcgcacccaacctcaatgtggttttaatgaccatttctctgacgattcatggtgtggagaatttctttgaaataccttttggccatttatatgtgctcttttaaaaactgactcctgtccaggtgcggttgagcatgcctgtaaccccagaacttcgggaggctgaggccaatggatcacttgaggcaaagaggcagaaatcagcctggccaacaaggcaaaaccccatctttactaaaaatacaaaaaatcagccacgggctgtgactcgtgcctgtggtgcaagttactcaggaggttaaggcacaggaattgcttgaacccggtaggcacaggtcacagtgagccaagatcatggcactgcactacagcatgggtaatagagaaagacctgtctcataaaaacaaatgaataaataaataagataaaaaataaaaaagtctctttatgtcctttgccgactttttaatgggattctttggagttttctgttgtagttgagatctttgtttactctcggtattagtcttttgtcaaaggaaaagtttacaaataatttcttccgttctgcagtttgtctgctcactctgttgagaggattatttctttggctgtgcagcagctttttgtttcagtaaagcttttgaatttatataattaaaattttcagtttggtttaaatttgcactggtcgatttttggttttgttgcctgtacttttgaagtcatactcttgaactctttactagacaataaccagaagagttttctctagttttcttctcacatttttattatttcagtacatatatttaagtctataattcatcttcaattgatttttgtagaaatagtgagaaataggagtccaggtttattcttctgcaaatgacaattcaattgttccagcaccaattattgaaaagggtgtgctttcctcaacgtatattcttatcagctttgtcaaagatcagttggctataaatgtgtggctttctttctgggctctctagtctgttacatcaatctgtgtgtctatctgtatactactaccatgctgtattggtgatgatggctttgtaatataatttgaagtcaagaaatgtgatgctcccagctttgtttatttgcttcagaaaggctgagtcaacagctgcagagatgaagctgcccctcctcgcagggctccttcccggaaaaagatcatggctcccactgaccatataaccatggctggaactcctgaaattcccaaagggaggccctacccagtgaggggggatgaatgaaggtcctacttaaggaatctgtctggccacaatcaggcacagcagctgtgctgccttgtgggggaccagaccacctggattccctggagcctgcaggctagaatgtctgagtccatggaaacacagaaatggaggccgccctcacctccccagaaaactgtagtctcaggcagtctccagccgattgccactggttggctgctattccaagccagtgggtcttaacttgagaggtgctgtggaagtggggcccacggaatgaggctgcttggctccctggattcagccccttttctaagggaatgtacagatggaactcccgccttgcccagctttccaagtatataaaactcctgagtctctgtgagtgtctgagcgagtgctctggcaacattcgacacggctctgtgtatctgacccaagacccttatggcatgagctaatgggaggatcttctgatccatgcgtggcaaagatgcatgggagaaacatggtttgtgggtaggggttgtgcattcactactgcttctcttggctgtaggtgaaggtttctttggctctgtgctgatactgggtgcaccatcacccaccccctttgtttcttctcctgggtcaagtcatttgcctaatcagtcccaatgtaggaacctggatacttcagttcaaggtgctgaattcaccgtgcttttcattcaggggaagacagctgcttctcattgggcatcttggcctgcccacttcacgtcactttttgtaaaatccacaccactccaggaatatccattacttaacttcgcctgaaataaacagaaggctcattacacttatcatgggctcacttacttcgcctataatgaaggtgccatggaaatgctagtggatgacgtggtccattttcttagggatgagatagaaaaatggtgtatggctttttaatttaattaaaatttttagtttggtttaaatttacattggtctctttttggttttgttgcctgtacttttgaagtcttactcgtgaactctttactggacaatgaccagaagagttttccctaagtttcttctgatattttgaccatttcagtacatacatttcagtctataattcactttaaattgatttttgtaaacatggtaagaaataggagttcagatttattcttccgcatatgataatgcaactgtcccagtaccaattattgaaaagggtgtgctttccctagtgtatattcttgtcagctttgtcaaagatcagttgcctatgaatgtgtggctttcattttggattctctcgtctgttacatcaatctgtgtgtccacatttatacctgtaccatgctgtattggtgactatggctgtgtaatatattttagagttaggaaatgtgatgctcccagctttgttcatttgcttcagctgaaaaggttgagtccacaattacaaagatggcagccgcccatccccggaggacctccaacccagaaagagatcaggcttcccaccaaccctataaccctggctggagttcctgaaattccaacagggaggaccttcccagtgaggagggatgaatcaaggtcaaatttaaagaaacagtctggccactatcaggcacagcagcagtgctgccttgtgggggacccctcctgctccagaccagctgccctccctggagcccgaaggctagattgtctgagtctacggaaacagagacggtggccgccccaaccacccagaactcggtagtctcaggcacttggcttgctatcttgccactgcttggctggtattccaagcccgtgggacttgagaagtgctgtgatgatggggaccacaggatgaggctgtctggctccctgtgatatggctgtgatgagtggaggaacaccagggctcatgtctcacacagaattggagaaaatgacacaaacacatgtacagtggttttatggcgtgcagtttaataggcaagaacgaaggaagagctccccatactgagacagagggaggggggctccaaagccaaaagaggaaacccggagtgctgtggataccaatgagttatatgaagaaactggagggggcggtgtctgatttgcatagggttcaggcgattggttcgaccaggcatgtcatttatgtggcccacggaaaaactggccctcccacctagcctttgaatatgcacgtgccggacaccctgatttcctacactcatggggatatatgggggtggccatatcgccaggcacaggtggggacaagggccagaagagggcgggaatcgctatgtttgggtggacccagtttctaatggccggcatctgcagatcaaggttaccggagaactctaaaagccggggctttcctgctagacaagactcatttctggagctgctttaaaaagaaacaaaacttcccaaggaccccttttcctccctgtctgcccaaaataatttcttaacaactcgtataacacctgaattcagcccccttactgggggaatgtaccaacggaactcccacctttcctggtttctcaaggctagattgtgtaaacctcctgggtctcggtctgtgtctgagcagctgctctgccaacactccacacagccctgtgtactaggcccaaggccgccgtgactcagcccatgggaggatctcctgatttcttggttgcaaagatccatgggagaaaaatggtttctggggcggggtcacacactcatggcttctcttggctgtgcaagaaggttcctttggctctgttccaatatagcgtggttcatcacccacccctgttttctttgttctcctgagtcaagttgtttgcctagtcagtcccaatgtgagaacctgaatatttcagttcacgtgcttatcgtgaaattcactgagactttaattcagtggaaggcagcctcttctaattggccatcttggcccgccccctccacgtcacctcccataaaatggccacgctctccagggacgatgccattatatatctttacgtgaaaccgacagaacacttattacactttttgtgagctcatttacttcacttataatgaacatggccatggaaatgctagtggagaaagtggtcgattttctgatggatgtgataaaaaaatggtttgccgaccaattaatgacatatgtctcaaaactagtaacgagacccttaatcgctgggttgaagtttctaatcaagaagatgctcatctatgtattcaacaaagcagcttcccttgcttctgaaatgcttccaaacaacatctcatatttcctgaagaagataatgcctggacaagcagcacaagtcattcaggtttactttcagctcataaatccagcaggatattcgcacaattgttgggaaaccttatcagttcatgagtcgtgcatgtttcctttaatttcaggaggaagagggtaatctggaagagtttcctgacctactctgctgctgtgattaaacaaccaccaggaaattttgatgacactgttctcctgagctcctccctttcctcggggaagaaaagcattgaaactacaaaaataaagtgttatttggctggagtgaggtctcatgtctgcttatgcggtggctcgctgctcagaacagggtgagtctctgagttgtacgctgaggaggggaggctgtcaatctagaaaaaacccattgcatgggacacctccatggggtctggggggctgaggatgaggagctggactggatctagggaaggaggaggtttcagagggtgaaattctggcagtaaatcctgggggtgtttgaaaacttcctccctcagaaggagaagactcagggaggaataaggacaaaccatgggtcccttgaggggcatttactaacttaagaggactttatcgggaagcagagtgacaatggcctccttgaggactgaggcccctggataaatgaggcccagatccagatccagtccatgggagatgagaccttcaagggacatatttttgttgggacagaggaaaagtgcagctctgcagctgcagaggaagccttggcagtgtgaaagcgaccttggagggggccctgtgcgttctgaatgcttctgaggtccatcccctgtccccgcctctttttctggattttttgggctccatggtctccgccatcttctgagcgctccacgctgccaccttcagttttctcttctgggctccaaatactccaaaatctttcatatctgtgcccctacccctgtttttagcatgtgttgggactccaggtccctgaaggtttctggcctgaaatccacctccccagcggtgtggattctgctctagagaccccgcacttggcaaggttcccaggcccctgggggacaaccgagtggtatgtgcacttcagggctccacactcggcaaggtctttcaagcccttggggttccctcctcagttttcttcacatgtctgggatgtagtcactctataaatgccgggatgtgatccccaccccagtgattttttttagttccatgagtgttgctatctgaatagtcatcctgagagtgatgggaccttttgaatttgcagcaagttttagattagtgtgagtggcctgagatcgcaaaactggggctagcattggatgtgaggttaggctggtggaaaaatttgcccagaacctgaggagtgtgggctcactgcaggtggttaggatcagcacagaattgcaaggatgtatagctttggggtaaagaataacatggttcagaagtacatgtattagtcttttcatgcattgctataaagaattacctgagactgggtaattaattataaaaactcaggtttaattggctcatggttccacaggctgtacaaaaaggatgatgctggccatcagctcaacttctggggaggcgtcagaaaacttagagtcatggcaaaaagcacaagggaatcaggctcatcctccatggccagagctggagctagtggtaggagaggtgctgcacacttttgaacaatcagatctttttagaactctatcaccagacagcacctagaggatggtgctaaattattcatgaaatatccacccatatgatccactcaattctcaccggcccaaccaggaccacctccaccattggggattacaattacacatgagatgtgggtggggacacagatccaaactcgatcagtgggcatcttggactgggtctactatagaagaagaaccaggagctgactatcatccttaagactgcccatgatggccaggcagggtggctcatgcctgtaatcccagcactttgggaagccaaggtgggtgaatcccctgaggtcaggagtttgagaccagcctcgccaacatggtgaaaccctgcctctactaaaaacacaaaaaattagatgggtgttgtgccagacgcctgtaatcacagctactccagaggctgaggcatgagaattgcttgaacctgggaggcggaggtggcggtgagccccaatcgcactgctacactccagcatgggcaacaataccaaaacatcgtctcaaaaaaaaaaaaaaaaaaaaaaaaggctgcccatgaccactgccccagtgagagggacaccagcatggctaagatcaagtgctggacattcttcatgggtcagacattaaagcaggccacactgttacagagatgggctccattcatagcaacaaagtggtgagaagatgtgggaatggcagaggccagcactttgccatcaatgcaaggtgggcataaggagctggcaccagtgccagagtgcatcaggggaggactgctttgcaatatctagcacttacctcttagagtatgtttcattagggacaacagatataaatggcagacaagtgagtcccttcagtaacaggaaatagaaatcatcaagaggaacagaaacagatgtcagcagccctcatataaagtcatcatccttcatccagttaaaacctgagacagttctcacataagaaggtctaattcaaaaagagactgggttctcatgaggcaggttcatgcaaaaccaagggaagtatacaactttgggattctccagcttcccttggaaaagacctacaatcatttgcttaggtaactgagcactgaacaaaggtgagtattgttatctttcagaagctgttggccatgaaggtcttgctggcataaaacccatggttggaaacatcaccatgacccctgttagagtaatggcctaagggcaagggtcaggaaattgatgtattccttgccaacttctgcgagacgagtgttggtccactcatctctttcacggaattcaccagtctggtatcttcaaaatccagaaggatgatggcagatggcaggaaactaatgcaaacaccatcagttgtacctccactgtagcagcagtaatggatgttatctcttcattgtaatatccagggagggagaagatgacattattctcaatattctaaacaccctgtgtgtacagcctctgtgatattttttgtaatatccgtgtgggagagaattatattactcctaatatctcaggggttgtgccccctctgtgacaatgttcctaacacccaggaggggataggatgatatcacttttagcatcacagggggtgtacaccccactgtaatattgttcataatatccgggggggagagaatgatattactcccaatatcgcaaagactgtacaccaacctgtgatattatttgtaatatccataagaggaagaataatattactcccaatgtcacaggaagtgtacacccttctgtgatattgttcaaaagatccagttagggaggggatgatattactctcaatatcttaaacaccctgtaggtaagccctctgtgatattcctcataatatccagagggagaggatgatattactcccaatattgcatgaagtctacaccccacctgtgatattgttcctaatatccaggatgggagaggatgatattactcccaatgtcgcaggggatgtacaccttccctgtaatattgttcgtaatatctagaaaaggagaggataatattactttcaacatcgcagggggtgtacaccttccttgttatattgttgctaatatccagggaaaaagaagatgacattaccaccactattgcagaaggtgtacacccccccttgatatagttcctaatatccagaaaaggagaggagatattactccaaatattgcaagaggtgtacattcccctgtaatatttttcctaacattcaggaagaaagagagtgatattgcccttaatattgaagggagtgtgccccccccgtgatattgtttctaatatccaagaaatgaaaggatgatattactcccaatatcacaggggctgtacagccccctcccatgatattgttcccaacatcggggggggggtgaaatagtattattcccagtatcacaataggtgtacacacctgtcgtgatattgttcctaatacccatgggggaaaggacgatattattcttaatatctcagagggatgtacaccctccctgtgatattgttcctaatatccggggtgggagaggatgatattacccccaaaatctcaaagggtgtacacccctcttgtgatattgttcctaatatccagggtggagaggataatattattcccaatatccaggaaaggaaacgatgatgttactgtgaatattccagggggtgtcctcccctctgtgatattgttcctaatatccaggttggggagattatgatatttctccaaatatcacaaggggtgtacaccaaccctgtgttattgttcctaatatcgatggggggagaggacgatattactcccaatatcacagggggtgtacaccacctttatgatattgttcctaatatccatgaagaaagaggatgatattactttcaatatcgcaggggatgtacactccccctgtgatattgttagtaatacctaggagaagaaagtgtgatattactcccaatatcgcaggggatgtacacgcttcctgtgatattgttcctaatatttagggggaaaggggatgatattactcccaatatcgaatggtgtgtacacccccccgtgattctttttttttttttttttttttttttgagatggagtcttgctctgccgcccagactggcgtgcaatggcgcaatctcggctcactgcaacatttgcctcccaggttcgcacgattctcctgcctcagccttcggagtagctgggattataggcagctgtcaccataccaggctaatttttgtatttttagtagagttggggtttcaccatgttggtcaggctggtcttgaattcctgacctcaaataatccacccaccttggcctcccaaagtcctgggattacaggcataactttccctgtgatattcttcctaatattcaggaagaaagaggatgatattgctcccaatatcgcagagagtgtgcactcctcctgtgatatggttcttaatattcagaggaggagaggatgatattactttctatattgcagaaggtgtacacctccctcgtgatgtctttcctaatatccagtgggggagaggttattagtctcaaaatcacagaaggtgtaaacccccatttgatattgttcctaatattcaggggtggggagagaaaggtattactcctagtatttcagggcatgaacacccccaccgtgatatcattcctaatatccagaaggggaggcaatgatatttctcctaatatcacaaagggtgtacaccccttctgtgatattgtaaatattctgtgtgtacacccccctgtgttatagtctgtaatatccgggtgggggagagggtgatatttctccccatattgtaggggatgtacacccttctgtgatatggttcgttatatccagggaagaaaaaggtaatattgctgcccatattgtggagagtgtacacccccatgtaatatggttcgtaatatccaggagtggagagggtgatactgctccttacatcgaggaaggtgtacaccttattgttatatgattcgcaatatccaggggaggagagagtgatattgctccccatgtcgcagggggtgtaaaccctccgtgatatgattggtaatatccaggaaaggaaagggtgatatttctccccatatcgcgggggacgtacatcctcctgtgatatggttcgtaatatccaggaggaaagaggaaaatattgctcttcataacccgaggggtgtacaacccctgtgatatggttcgtaatacccagaagtgtacacccctctgtgatatggtttgtaatatccagggggttagagggtgatattgctccccatatcgcagtgggggtacacccccctggattggttcataatattcatggggggagaaatttacatttatcctcatatcagggggggtgtacaccccccgtgatatggttcgtaatatccaggggaagaaagggtgatattgctccttatatcgcggaaggatcaccctcccctgtgatatggttcataatacccagacgggaagagggtgatattgttcttcataaagcgaagggtgtacagccccctgtgatatggttcataatatgcaaaaggggagagggtgatattgctccccatatcacggagggtgtactcccttctttgatatggttcgtaatatccaggggtgtagatggtgatatagctcgccctattggggagggtgttcacccctctgtgatattgttcgtaatgtccagggaaagagaggatgatattactcccaatatcgcagaaggtttacaccactctgtgatattgttcataatatccagggaaggagaagacgatattactcccaatatggcagggggtgtagaactcctgtgatattgtttgtaatatccaggcaaggagaggatattactctcaatatcgcagaaggtttacacccctatgtgatactgttcatgatatccagggaaaaagaggatattactccctatatcacaaagggtgtacacccctttgtgatattttttgtaatatccaggggagagaggataatattactctcaatatcagaaggggtgaaaaccctcctgtgtcattgttcataatatttagggaaggagagagtgatattactccaaatatcacagtgggtgtacacccccctatgatattgttcctaatttccagaaggggagatatgatattattgccaatatcgcagaaggtgtacaccttactctgacattgtttgtaatatccagatggggaaatgatgatattactcctaatatcacagggggtgtacacccccttgttttattgtttgtaatattcaggggaagagacgattatattactcccaatatcgcagggtgtgtacaacactctatgatattgttcataatatccaggggaggagaggaagtgtacacccccccgtgatattgttcgtaatatccagaggtagagaggatgatattactcccaatattgcaggtggtgtacacctttctgtgatattgtcatgatattaagaaggggagaggatgatattactaacaatatcacaaaaactgtacactccctgtgatattgttcataatatccagaagaagggaggatgatattattctgaatctcgcagaagatatacaccaccctgtgatatggttcataatatcctaggggaaagaggatgacataactgtcaatatcgcagggggtgtacaattccctgtgatattgttcacaatattcagagggaaaaaggataatattactttcaatatcgcaggcggtgtacacattactgtgttattgtttataatatccggaatgagagaaaattttctcccaatatcacaggaggtgtacactcccctgtgatattgttcgtaatatccagggaggggagaggatactattactcccaacatctcagggagtgtaggccccccctttgatattgttcctaatattcggaagtggagaagatgatattacttccaaaatcgcagggggtgtacactccctctgtaatattgtttctaatattcatgagtggaaagaaagatattactcccagtattgcaggggacatacaccacactgtgatcttgttcacaatattcgggggggagaggatgatattactcccaatatcaaagtaggtgtacacccccttctgatattgatcgtaatatccagaattaaagatgataacgttactcccaatattgcagggggtgtacatttttgaatactgttcataatattaagagggggaggggatgatatctgtcccaatatcgcaaagtgtgtacacctcctgtgacattgtcccaaatatccagaggaaaaaaggatgttattactcttaatatctcagagagtgtacacctccctgtgatattgtttgtaacatccagaagaaagaggctgatattactcttaatatcgcagggggtgtacacccccgccccgggatattattcgtaatatccagggggaagtggaatgttcagaatgggagaggatgatattacttgcaatatcatagtgggtgtacaccccactgtgatattgtttgtaatatccgggaaaggagaaaatgacattcctccccatatggcaggggctgtacaccacctatcatattgttcaaaatatccagaaggggagaggatatgtctccaagtatcacagggggtgtacaccccgctgtaatattcttcctaatatccagggtgtgagaggataatagtactcccaatatcccagggcatgtacaccccccttgtgatgttgttcctaaaattcatggggagaaagaatattactcccaatatcacagggggtgtacatacactctgtaatattgttgccaatatgcagcaggagagaggatgatattactcccaatatcacaggggctgtacaccccgctgggatattgtttctaatatcaagggggaaaaaggatgatattactcccaatgtcgcagggtgtgtacttcctctttgtgacattgttcctaatatccaggagagaagagggtgacattccttccaaaactgaaaggggtgtacacaccctttgagatattgtctttaatatccagaacgaaacaggatgatataactcctaatactgcaggggggtacaccctctctgtgatactgtttctaatatccaggaggggaaagaaaaatattaatcccaatatcacagggggtgtacattccccctttaatattgttcctaatatccaggaagacacaggatgatactatttccagcagcacagggcatgtacacccctttgtgatattgttcctaatatccaggaaaagagaggatgatattactgtcaatattgcagggcgtatacactggttctgtgatattgtttctaatatccgggggtggagaaaatgatattactcccaatattccagcgggtgtacacccgttctatgatattgttcctaatatctgggggagagagaatgatattattgtcaatatcacaggggatgtacagattccctgtgatattgtttctaatattcacagggggagaagggtataatactcccgatatcgcagggggtgtacactccccctgtgaagttgttcctaatatccagggattgagagaatgatattactcccaatatcacaggcggtgtaaaccccctgtgtgatattgttcctaacatccagaggaaaagatgatgatattattttcaatatcacagggggtgtacgcatccctgtgatattgtttctaatatccaggggaggagaggatgatattattgttaatatcgcagggggtgtaccccaccctgtgatactgttcctaatatccggggtggaagaggataatattgctcccaatatcgcaaagggtgtacaaccttcctgagatattggtcctaatatccagggagggagaggatgatattactttcaatatcacagggagtttacacaacccctgcgatattgttcctaatatccagcggaagaagagttaggataatactattttcaaaattgctgggtctgtaccccctccccgtgatattgtttctaatatccaggaggggagaaagtaatatgactcccaatatcttagaagatgtacaccctccccataatattatttcttacatccagggggtagaggatgattttgctttcaatatcacagagggagtaaacctttccggtgatattgtttttaatatttaaaaagagagaagataaaattactcccaatacaaaggggatgtattgtgtactcccccctctgatattcttttttaatatccagatggagagaggatgatattactttcaatattgcatgggatgtataaatcccctgtgttattgttctgaatatacaggtggggagagtatgatattactccaaatatcgcagggggttctttccccctgtgatattgttcctaacattcagggagggagaggatgatattactcttaatattgcagggggtgtacccacgcctatgatattgttcctaatatccagagggggagaggatgatctaactcagaatatgacaaggggtgtacacacagcctgtgatatggttcctaatatacaggggagaaggggataatatttctcccaatatcgcagggggtgtacaaccccctgtgatactgttcctaatatacagaaggggacagcatgatattgttcctaatatcgcaggaggtgtacaacgccctgtgatattgttcctaatatccagggcgggagaggatgatattaccctcaatatcgcagggggtgtgcactttccctgttatattgttcctatgatccgggtggggggaaatgacattagtcccaatatcgcaggatgtgtgcaccgctcccccgtgatattgttcctaatatcaagggggagagaggaggatattactcccaatatcgcaagggatgtacatcctccatgcgatattgttcgtaatattcaggaggagagaggatgatattactcttaatatcgcagaaagtggacacccaccctgtgatgttcttcataatatccagggaagcagacgattatatgactttcaatatcgctgggagtgtacatcccttttgggatattgtttctaatatccaggaagggagaggattatattactctcagtattgcaggcagtgtacaccttttttgtgatattgttcctaatattcagaaagggaaaggatgatattactcccaatattgcaggtggtgtatatccccctctgatattgttccttatatcaaggaagagaaagaataatattactcccaatatcaaagacagtgtagacccctcctgtgatattgtatttaatatccatggggaaagaggatgatgttactcccaatatcgcagggggtttacacccacactgtgatattattcctaaaatccagtggaggagaaaataatattgctcccaatattgcagggtgtatacaggccctcccccgttatattgctcctaatatccagcggtggagaggatattactttcaatttgtgtagggagtgtatacccccctgtgatatttttctaatatcaaggatgggaaaggatgacattactcccaatatcgcaggaggtgtacacgccctgtgatattgttcctaatatctagggaaggagaggatgatattactttcaatattgcaggagctgtacaccctctgtggtattgttcttaatatttaggttgggagaaaatgatatgagtccaaatatcgcagaaggcatacacacttccaataacattgttcttaatatccgggggagagggtgatattactcccaaaatctctggggggtgtacacccccttctgatatttttcctaatatccagggaaggaaacgatgatattactataaatattccaaggagtgtacaccttcctaatatcctaatattgttcctaatatccaggggtgggagaggattatattactcccgatatcgcagtgggtgtacacccctcctgtgatattgtttctaatatccaagctaggagaaaatgatatcactctcaataccacagggggtgtacaccttccgcatcatattgttcctaatattcagagggaaagaagatgaagttactttcaatatcggaggggttgtacacaacccctgtgatattgctgctagtatccaggaagaaaggggattatgttactccccttatagcagggggtatacacctcccctgtaatattgttcctaatatcaaggctgggatatacgtggggggaaggatgatattactcccaatatcgcaggggttatacaaccttctgtgatattgctcctagtaaccagggcagaagaagatgatattactcctaatatcgcaggaggtgtacactcccccattatgttgttcccaatatgcagaaaaggagaggatgacattattgccagtatcgcagggtgtgtacaccacccctgtaatattgttccaaatatttagggggagagaggatgatattactcccaacatcgcagggggtgtacacacatcccctgtaatatagttcttaaaatctaggggaaaaggggatcttatttctctaaatattgcagagggtgtacactccccggtgatattgttcctaatagccgggagggagataattaaattactttcaatatctcagagagtgtacatcgcccttgcgatattgttcctaatatccagagcaaaagagaatgatattactcccaatatcttaggagtgtacatttaacctgtaatattgttcctaatatccagggggaagagaatagtattactgccaatatcgtaggggttgtacaccttttctgtgatattgttgcaaatatttagtagagggaaagaatattactcgcaatatcacagggaatgtatacttcccctgtgatattgttctgatatccagaaaaagagagggtaatattactcccaatattgcagggggtgtacaccccccttgtgatattgatcctaatataaaggaaggaagaggatattactcctcatatagaaggggttgtccaccccccttgtgatattattcctaatattcagggaagcagaggatgatattattttcaatatcacagagggtgtgcagtccacctgtgatattgttcttaatattcggggggagaggatgttattatgcctgatatcgcagtagaggtacacccctcaagtgatactgttcctaataaccaggggtgaagaggatgatattactcccaatatcgcaggtggtgtacacccccccatgatggtttctaatatacagagggggagaggaaaatattactcccaaaatcgctggaggtctacaccccccttgtgatattgttcctaatatccaggaaaggaaacgatgatattactgtgaatattccagggggtgtacacccgctttgtaatattgttcctcatatccagggtgtggagaggattatattactcccagtatcgcagggggtgcacgacgcccctgtgatattgtttttcatatccaggaggggagattattatcaatatggcaaggggtgaacaccccctgtgatattgtacttaatagttaggttggcagaaaatgatattagtctcgatatcgcagggggtgtgcactccgcctggtgatattgcttttaatatcaagggggagaaaatggcattactcccaatatcgcagggggtgtacaccgctcatgtgatattgttcctaatatccaggtggagagaacataatattactcccaatatcgcacaaggtgtacacccctcctgtgatatggttcctaatatccatgggaggagatgatgatattactcccaatatcacaggggatgtacaccacccttgtgatattgttcctaatatccagggaagaaaacgatgatattattgtgaatattacagggagtgtacacactccctgtgatattgtttttgatatacagggtgggagaggatgatattactcccaatatcacataaggtgtacaccccccgtgatattgttctaaatatttcggtggggagaaaatgatattagtctccatatcacagggggtgtgtgctcctcaggtgatattgtttttaatatcaagagggggaggagattatattactttcattatcacagggggtgtacacccctcctgtgatattgttccttatatccaggcgaggggaaaataatattactctcaatatcgcaggaggtgtacacaccccatgtgatattgttcctaatattaagggggaaagaagataatattactttcaatatcacagggtttgtactcctttcttgtgatatagtttttagtatccagggggaaagagcatgatattactcccattgtagcaaggggtgtacacacctcctgtgatattgttcctaatatccagaagtggtgaggatgatattactcccaatatcgcagggggtatacaccccacctatgatattatttctaatatccatgggaaaagagtatgatattacacccaatgtcgcagagggtgtgtatttttcctgtgatattgtttctaatattcaggcggggagaagatgatattactctcaatatagcagaaattgtacatccccgctgtgatattcttcataataatcagggaaaaagaggatgatattactaccaatattgcaggggggttacacttcccctatggtagtgttcctaatatccaggaagaaagaggatgatattaatcccattatccaggaagtgtacacccaccctgtcatgttgttcctaatatccagcagggaagaggatgatattacaccccccccccgtgatattctccttaatatccaggaggggagaggctgatattactggatatatagcaggggtgttcataccttctgtgatattgttcctaatatccagaaaaggagaggatgatattacttccaatatcgcagaaggtgtacacctccctgtgatattgatcctgacattcagaaggggagaggatgatattactcaaaataccgcagggcatgtgcattcccttgtgatattgttcctaatacccagaagggaacaggataatattactttcaatatcgcagggagtgcacacccccctttggtatggttcttaatatccagaaggaaagagggtgctattactttccatattgcaaggggtgtacaccccactgtggtatggttcataatatccaggcagggagagggtgctattactccccacagtgcggggcatgtacaccctgctgcggtacggttcctaatatccagggggagagaggatgctatgactccctatatcgcggggtgtgtacacccctgtgtggtatgttttgtattctccaggaacggagagggtgttgttacccctcatatcgctggaaatgtacactcccctgtggtatggttcgtaatatccaggggattgagggtactgttacccccatactccccatatcgtggggggagtgcacctccctgtggtatggttcgaaatatccagggtaagagagggtgctattattccccattttgcaggaggcgtacacccccctatggtatggttcgtaatatccggggtgaggggatgctatcaaaagaagagagaaagagaccccccatattgttctatattattttatactcagtacctgttttaagaagaaacaaggaagtgaaaccaaaagcaggcagcccggcgccaggcaccagacccaaaaccagacccgaaaccaggcctgggcctgcctgaccttagcctgatagttaaaattcaacccatgacctagcaaccaatgttatccatagattccagacattgtatggaaggacattgtgaaatttcttgttctgtgctgtttcactctgattaccggtgcctgcagcccctgtcacatacccactagattgctcaatcaatcatggccctttcatgtaagatctttagtgttgtgagcccttaaaaaggacagaaattgtgcactcaacaagctcggattttgagacgctagtctttcgatgcttccagctgattaaaagccacttccttcactacctcggtgtctgtggggttttgtccgcgactcctcctgctacactatgactccccatatcaaggggggtgtacacccccctgtggttcgtaatatccagcaggggaaaaggtgctattactccccatattgcagggagtgtacacccccttgtagtatggatcgtaaaatcaaggggggagggaaggtgtaattatccccatatctcagggggtgtacacccctttgtggtaaagtttgtaatatccagggatattacagggatattatccccaaattaatacttttataatttcttatgcctgcctttactgcaatctctgaacataaattgtgaagatttcatggacatttatcacttccccaatcaatacttttataatttcctatgcctgtctttactttaatctcttaatctcatcatctttgtgagctgaggatgtatgtcgcctcaggaccctgtgatgattgcattaactccacaaattgtttataaaacatgtgtatttgaacaatatgaaatctgggcaccctgaaaaagaacaggataagagcgatgttcagcgaacaagggagataagcataaggtctgactgcctgtggggctgggcagaacagagtcacatttttcttattgcagaaaatgagtaggagaaatatcactgggaagggaacgcattcctaggggaggcctatggacggccgctctgggggtgtatcccttatgtggttgaagataagggatgaaatacaccctggtcccctgcagtgccctcaggcttgctaggattagaaattccagcctggcgaattctagtcagaccagttctctgctcttgaaccccgtttcctgttaagatgtttatcaatgacaatgcgtgcacagcaggacatggaacctcaatagtaattccattttctccctggccttgtgaccttgctaggcccttctgcccttgtgatcttttattgccatttgaagcatgtgatctctgtgacccactccctattcgtatccccctccccttttgaagtccctaataaaaacttgctggttttgcagatcaggtggtcatcacagaacctgccgatatgtgatgtcaccccggaggctcagctgtaaaatttctctttcgtactctttcactttatttctcagaccaggtgacacttaaggaaaatagaaaagaacctactttgaaatattgggggctagttcccccaatagacattgttcctaatatccagaaaaaaagaagatgatattactcccaatatcacaggggttgtgaaccccacctgtgatatggttcctaatatccaggaagggagagaatgatattactctccatattgcagggggtgtgcacatccctgtgatattgttcctaatatccaggggaggagagggtgatattactcccaatattgcaagggttgtaaactccaccctgtaatattgctcctaatatttaggatttagggggggagaggataatattactcccaatatcgcaggggatgtatatgccctctttgatattgttcctaatatccagggggggagaggataatattactttccatatcacaaagagtgttcacccccctgtgatattgttcctaatatccaaaaaggaagaggatgatatcaatcccaatatcacaggaagtgtacaccccccccttttatattgtttctaatatccaggggaaatgagggtgatatttctctcaatatagcagaatgggtacactccccctgggatattattcctaatatccaggggaaaaaaagaggttgatattcttcccagtatagcagggaatgaatacaccctttgtgatattgcttctaatatcaaggggaaaagaggatgatatgactcccaatatcacaggggatgtaaacctgtggcgttgttgctaatatcaaggagggaagagtatgatattactcctaatgtcgccgaaggtgcacactttccctgtgatattgttcctaatatccaaaagggaagagaatgatattacccccagtattgcagggtgtacaccacccctgtgatattgctcctaatacccaggaaaaaagagaatgctattacccccaatatctaaggggacgtataccttccctgtgatattgtttctaatatccaagtggggagaggatggttttactctcaatattgcagggagtgtacactccccctgtgatactgtttctaatactcgggctgggagaaatagtattactcccaatatcgcagtgatattgtttccctgtgatattgtttctaatatctagtgggggagataattatattactaccccatacacaggggagggtgtacattcccctgtgatattgtttgtaatatccagggaaggagaggatgttactcccaatatcacaggggttgtacaccccttttttgatattgttcctaatatctggggggcagagaattatattactgtcaatatcacagagtgtgtacaccccctctgttatattactctttatattcagggcggtagaggatgatattactccctatatcacagggggtgttcacccctcctgtgatattgtttataatatctaaggggaaagaggatgatatcactctcaatatcaaaggaaatgtacacctttcctgtgatattgtttttattatataggggggcagaggatgatattaagaacaataccacaggggatgtacacccacgtattgatattgtccctaatatgtatggggaaagaggacagtgtaactcccgatatcgcagagtgtgtacacccccttgtgatattgtttctgatatacacggggagaaaagataatatttcttccaaaattgcagggggtgtacaaccccctgtgatattgtttttaatatccagtgggggagagaatattactcccaatattgcagggcgtgtacacaacccctgtgatattgttcctaatatccagagtaggggaggatgacattactttcaatatcgcaaggggtgtacattcccctgtgatattgctcctaatatccatgaggggagaggatgatattattcctaatatggcaggggctgtacaccttccctgtgatattgtttctaacatccagtgggggagaaaatgatattactccctatatcacagaaggtgtacactttccctgtgatattgttcctaatatccagaaggggagaggataatattactcccaatatcgcaggaagcttacaactcccctgtgatattgtttctaatatccagggaggtagggatgatattactcccaatatcgcaggggatgtacactcccccgtgacattgtttctaataaccagggggtgagaggatgatattacgcttaataccgaagggggtgtacacacccttgtgatattgtgcctaatagccagggggaagaaaattatattaattttaatatttatggggaaaaaggatgatattactcccaatatcacaggggctgtacaccgaccttttgatattgtttttaatatccagaagagaagaggataatattgctcccaatatcagaaaaggtgtaaaccccttctgtgatattggtcctaatatccagggagggagagaataatattactaccaatatcacagaaggtgcccacccccaaggtgatattgctcctaatatccaaagataatagggtgatgttactcccaatatcacaggaggtgttcacaccccttgtgatattgtttctaacgtacagggaagggagaggatgatattattcccaatatcacaggaggtgtatactcctctgtgatattgattttaatattcggggggaaaggatgatattactccctatatcgcagagggtgtacaccctctgtaatattgatcctaatatccagggcgggataggatgatattactcccaatatcgcagaaagtctacacaacccccagtaatattgtttttactatccagggggaagaggatgacattactcccaatttcacagagtgtgtacactcaccatttgatattgtttctaatatctagggggagagaatatattactcccaatatcacaggaattgtacaccacctctgtgacattcttgtgaatatccggggaaaaagagaataatattactcccaatattgcagagcgtgtacacccctccatgatatcgatactaatatttttttaaagaggatgatattactcccattgtcacaggatgtgtacaccccccttgtgaaattgttcataatattctggggggagagcataatattactccccatatcgaaaaaggtgtccaccctccttataatatggttcctaatatccaggatattacttaatccaggatacttgtaataccctaaatatacaattgcttgaacctccacctcccaggttcaagcaattcttctgcctcagcctcccgagtagctgggactacaggggcacaccaccacacccagctaatttttttttcttgtatttttagtagagatggggttttgccatattggccaggctggtctcaaactcctgaccttgtgatctgcccacctcagcctcccaaagtgctgggattataggcgtgacccaccgtgccaagccaggaagaggatgctctatagatttccccaataagagatggctttgcagggccattccaaaatatgtcaaagaaatacatttggggataaaatactttgatttcctttagggaatgttatctattatgtgatgctataccagagtcaggttggagtcggttatcttattgcaacaaagagtctgttccgtcactgttgggatctctattttttcctcttatttcttgagacagggtctcactctgtcacccagtctggagtgcagtggtgcgatcttcattcactgaaacctctgcctcctgtgttcaggtgattctcgtgcctcagccccttaagtaactaggattacaggtgtgcgccaccacacccagctaatttttgtattttcagtagagatggtattttgccctgttggccaggctggtcttgaactcctggcctcgtgtcatctgcccacctcgacctcccaaagtgctgggactgcaaatgtgagctattgtgcccagccaggatctctgttttaatgttagtgctggtcactttgcatgaactccaaagggaagaaatataatgaggtgtgtctgaccccctgccttctcatcgtgacctgaattagtttttcaggtttgcaggggatacccttggacaagaaggggctctattcggttggttggggggattagaattttactttttgtttacaatatttctcctgaaagagttaggggctcacaaggaatttccgcgtgagcaacttatgaggaaagccatctgggaagatatgtgtccttgtgtcactgggatattctcgtttaccccaatgatacggcaatgacgcagggttgtgaaattacagctatgtgtttggggaaaaaagaaagcaggattgtgtgactacgtttccaaacttcacttgcccttagccatagtgagttgggggcctggagattctgttttctttcacaatgatatagatacaattaaatgtatagaaagcaaaaaaataaaaaggtgagtaatgaggaacctctgattcctgagtggccatgtagttacccatggcacagagccacagttactgaaggtaaagtttgctggggaatttagaaatgaatccagctcttggaggagtcagtttactggatgcctaagaaaatgcaaacaaaataagaaaaaagggtaatattcaatcccatagttattgttacctgtcatagctaaagtaaaattaaaacagagtgctggcttcaatcttgatgctacactaagcttagatttcagtgaatgtgagtctcagccactagctcagagccacctcccaaagaccaaatcatgtagggacaatagaaagtacttctgagaattgtggttaccaagaacctagtaactgttggggaggagcaaaacaaagtacagaaaccagagggtacaatctgagtgagactgctatcagcttctggaggagcctttactaaaatgaatgatgagagtaactggatgatgagagtaactaatggatgatgagagtaagcaatgtctttggttttcttttttttttttttttttttttagcagacgtctcactcttgtcgcccaggctggagtgtaatggcatgatctcgcctcactgcaacctccacctcctgggttcaagcaattctcctgtctcagcctcccgagtagctgggactacaggcactcatcaccacacctggctaatttttgtatttttagtattttctggtgagggtccaggtttccggaaacaactcagagacatatgttaagatgttatctttagttttcacagggaaccaaatatgttacgactccaatttccttggctattgttttaagttaccattaccttctcgttgatcaagttgctcatttacttctcaagcctagctagatgcctggaatttcccttgaaggaagtcaagattttcctttatctccatactggctgatggtgatcgagtaagcccctaagaggggtccctgctccatctcgagatgctgctagattctacagtgcctaataaacagctctcgcctggccgacaaagagctgcttgctctctggatagcaattccaaagtgaacagacaacatcctgtttggaagactgccactctgttagaagaagcatcaggaaaacctttcttttgagctatttataactaacagcaattgaccaagtatacttttgtgagtgaaactgacctttctccctgtaagaattctccaaaatttggaaactatttgtgagtatttttacttatggcaatataattattggcacaagctcaatcagattcggttttctttcgtaacaggaaccattggagatactcattactctttgaaggcttacagtggaatgaattcaaatacgacttatttgaggaattgaagttgactttatggagctgataagaatcttcttggagaaaaaaagactgggtatattttcaatatgctttccttttaaggtccctcacctgtggaaagtaaagaatgtcactttctgacaggctcaggaacctcaagttatgtagggatctcaagaagatgggggaattcacccagttcatacaggtgaaattgctgttgcaaagattatgaatatgagagaagtccagcatggctgacttcatctcgtgtctggcctcaggctggctgcccttgctcactcttgggcataggccaagctagccatgggaggaatttagtttatagtttaactttgaagcacggatgataatagtctctccctaaaatgaaccccttccttgctcagggactgaaactacctttgtatgacaaatgaaagcccacaagattaagattatgagaggggcctgaattctgctaaaatgcaggtgtagctgactgataacaagtcattgtcccacagcttgcctttctataatctcttgcttctcaggagtcacatggccagaggtcctgagatttccagtcctgtgacccccacccagagatggacttagtgcatgaggaccattttccacacccctatgatttcatcctcaaacaatcagcagcaaccattccctagccccctgccttccaaattatccataaaaatcctagcctctgagttattagggagattgattaataatcccagtcctaccccttgggttgctctgatttaattaaaccttctctactgcaataccacggactcagtaaattggttttgtctgtgcaatgggcaagaagaacatgttgcatggttatacaggtactacaagcacagtctgatggcaaattattggttttgcttcctgcccttgatgtttctaaacatctagtccaaaattacttgtgaaaggtccagcaaagccaattttaaaagaggctatatggccaatcactattctttctacacattattgcaaataatcaggccacggctgggcacggtggctcatgcctgcaatcccagcactttgggaggctgaggcaggatcacctgaaatcaggagttcaagaccagcctaggcaacatgataaaaccctgtctctactaaaaatacaaaattagccaggcatggtggcatgcacctgtaatcccagctacttgggagactgagggaggagaatcacttgaacctgggaggcagagattgcagtgagctgagatcacaccactgcactccagcctgggcaatagagtgagactttgtctcaaataataataataataatcagaccaagtataatgaaattaaaatttattttgcaaataaattggtcctactacaatttatccttcatagaaatgtggaaactgaagataaaaaaaattaggtttcagaagaaaactatactacacctgttattagattctagccctaaacattgtttttgaggtttttattatttacctgcaatttggtctaaattctgaattatttcctgactacaagtatccaaggaataaatgggttttctttttctttatgatagttttagttggcttctaatgcaacaacaatttttattgtaatcctgtgtgcattctattcctactattcaaattattaatgttatagatctttcattgtagtacttctgaattaaccaaaatcacagtattctgaagatgattctacaaagcctgctgtttctacaaaggctgctgatgatttctacaaagcctgctgtagtgttgctgtggcctctgcttaaaaaagtagaaaacacattgatgcagcatgttcaccccaacctccctgcctaaaggctcagggaccatcttggaagaggaaggcgcgtgagattgtaagagccgaattagggggatggagtgtggagaataaggacacttcatcttggatgctcacctgccaaattgacttctgatgaaagccagctccagaaatgtgcctacagttactactttcacctaaaccctgcccttagtcaaatccttctcttcttctaagcaatcaacttcaattccttgtataacccacagtataaaagggcttttataccattctatcctattgcatgtaagccttgggtctgggaggtaacagtgtgggattccaccatctcatctccctgccacccaaacatgcctgctcttctttaagcaatattaaatgtttgtacttcagaaatttgatttgtcagcctcttcttcagactctcagcttctttggcctttgggagtaaatttgcataggcctgctcaaaacaggatgttctgggggtttgggggtgttgttttgttttgttttttgttttgtttagagacagggtctcactctgtcacccaggttggagtgcagtggtgcaatcatggcacactgcagcctcaaactcctaggctcaagcaatccccccaccttggcctcccaaagttctgggattacaagcataagccaccatgcccagccctggacttttctttaaagacatttacacagtgtaggaattactgtgggtgcactgctcaggtccccttctccaggatgctcattcctacctcatagatgattttcctgcagagatttgacctcagctgaagggcagtcacctggtccaggtggttgctattcacctccttcctgagaacagccaacagccagggacacgctagcacagagatataagagcgaccaaggtgaggccccttctgtgctgcggtgcatgctccagagcctccctgggatcagacttaagagggtctccagccagatctggtcttcgctgctttcctcgagctccccagcgcactcctgcaatgcatcttttttttttttttttttttttttgagacggagtttcactcttgttgcccaggctggaatgcaatggcgcaatctcagctcaccacaacctctgcctcgcgggttcaagtgattctccttcctcagcctcccaagtacctgggattacaggcatgcaccaccacgcccagctaattttgtatttttagtagaaacgggtttctccatgttggtcaggctggtttcgaactcctgacctcagttgatcctcctgcctcagccttccaaagtgctgggattacaggtgtgagccactgtgcctggcccaatgcacctcttgaatcacctcctcatgctttgcttttagagaacatgatccccaacatgtgattccagcaaagattctagaaagccaaccgtgacaatcacttctgggtttagatgacccccccccaccacaagatggcagtgagcacctcatcacagaggtgctgatggtctgcagcaccgcgccaggccagaacgtgccttttacagaagaaaataacccagtagctgactaggatggtgaggagggctggtgagcactgcggtagtgagagggacactagcatcactgagatgcaagtgatggtcatttttcataggtcaaagctcaaagcaggggacagttacagggcagggcttcatagcaccagtgtgatgaaagtatctgggagtggctaaggccagcactatgccatgggaagcaaggtgggcctgaggaggaggcagcagcgtcagcctgcaacaagtgggggctgccctgcagagacctaagagtcatgttatagagcacagtgtctgtaaggccaagaagtgtggacagccaagtgtgtcaattactagacatactcaagaggagcaggaagggcagggcatggtggctcatgcctgtaatcccagctacttgggagactgaggaaggagaatcgcttgaacccgggaggtgaaaattgcaatgagccgagatttcgccactgcactccagcctgtgtgatgggagcgggactccatctcaaaacaaaaaaagaaaaaggaaaaagaaaaaaagaaaaacctaggtatacttctcaagcaaataaaaataatcaaaaccaatatcatgcccgggcacaaatttcatatatataacagatttaaatatatgagggtgattatcctctcatatctccatttttttttgtttttccatttttttctttactaaaaaaagttaatgccaatgacacacaatttttttttttttttttttttttgagatggagtctcacttcttcgccctggctggagtgcaatggcgtgatctcgactcactgcaaagtctgcctcctgggttcaagcaattctcctgcctcagcctcccaagtagctgggaccacaggagtgagccaccacacccagctaatttttgtatttttaatagagacggggtttcaccatattggccaggctggtctcaaactcctgatctcaaataatctgcccgcctcggcctcccaagattctgggattataggcgttgagccactgcgccccgcctatgtatgattttttttttaattttattttcataagtttttggggaacaggtggtattttgttacatgagtaatttctttagttgtgatttgtgagattttggttcacccatcaactgagaagtatacactgaacccaatttgtggtcttttatccctcacccccttcccaccctttcccccggagtccctgaagtccattgtatcattcttatgcctttgcatcttcatagcttagctcttgaacccttactttctgtttgagggagaagacatatcatctacaagtagatactgtgtaaacattccattgcatgactatcccataacttatttattatttgtgtttggttatttgctgctatgtaacaaccccactcccaactaaatggtgtgacaattccatgattctgtggatcaaaaattctgaaaagtcaaacccaaggagttttgtctctgctccatgatgctaaagcctccgcaggggtgaggcgaatggctcagggtgactgaaaagctcagggttggaacagctggggatgaggcctctatgtataagatgattcttcactcacaggtctgaaactatggtggggacagccagaaggctcggctcagctgggacagtcacctgagccctacacatgacctctccaacatggtgatcctgaagcagttgggtttcttacacagcatcacacttttcttttttttttttttttttgagatgaaatattgctctatcacccaggctggagtgcagtggcacgatctcagctcactgcagcctccgcctaccaggttcaagcgattctcctgctccagcctcccaagttgctgggattgcaggcgcctgccaccaagcccagctaatttttgtatttttagtagagacggggtttcaccttgttggccaggctagtcttgacctcttgacctcaggcgatccgcctgcctcggcctcccaaagtgctgggattacaggcatgagccaccgcgcccggccaaagctcacacttcttatgattcagccttagatgtcacatcagttcattttccccacacttattagtgttagaagtcacaagcccacccatactcaggggactggcacacagaccccactctcaatggaaggggtgggacaccaccattcctgctgatgggcatttgggtaacttcctgtttgaagctattaagattgggctgctgtggccgggcgcagtggctcacgcctctaatcccagcactttgggaggccgaggcgggcggatcacgaagtcaggagatcgagaccatcctggctaacacggtgaaaccccgtctttactaaaaataccaaaaaaaaaaaaaattagctgggcatggtagcgggcgcctgtagtcccagctactcgggaggctgaggcaggagaacggcgtgaacccgggaggcggagcttgcagtgagccgagattgtgccactgcactccagcctaggcgacagagcaagactccgtctccaaaaaaaaaaaaaaagattgggctgctgtgactattctagtaggtgtctttggtgagcgcctacacgtgtttctctttttctctttagtatatgcccaggaggggaactgctggctcccagataccgtatgttcagggtcacacacacttccacagggttttccaaagcccttgtaccagcacgcactcccagcacctgtgtgactgctccagctgtcccacagtctcatcagttctattgctgatattttcattttagcttaagttatatttaataggaaaattaccgttgcctctgccccccgttcctgcctgtaggagtttctcgtagctgttgctacaggtggccacaaatctgtcacttaaacccacacaaattgatgtccttatggctttggagtcagaagtgtcaactgaaggtactagcagggctgtactgacctggtggcctcagggagcatctgtgctgcttctccaccttctagaggctgctgcatccctcgctccagccccttcctgacaccactcaccctcctacttctgttatcacatcctcaccttctctgtgttcagggctccctctgtctctctcttgcaagcacacttgggattccattgagggccacccacataacccaggagaatttctccacctcaatatccttaacaactgcagagcccttttgccataaaagttaccattcacgggttccagggattgtgacatgggtagctttaggagtgattattcctgcctgtctcccgctcaccagaacttggactttctctctcaacaggagccccctgtgtgggaatagcctgtctcaacgacgccctctataaggacctgcttcctcaaaggacctcatagtcgggtcctgcccctcagtgtccagtctgccttggctggaggggctgcaggggtgtgttggcgccacctggtggagacagggcatcacagcaggtgggagcccagtagaagcacaaccaaaacatgggtaatgtttaaaattttctggctaagcgctgtggctcacgcctgtaattccagcactttgggaggccgaggtgggtggatcacatgaggacgggagtttgagaccagcctggccaacatggtgaaacatcccctctactaaaaaatacagaaaaattagctggacatgtggcgcgctcctgtaatcccagctactcgagaggctgagacacgagaatcgcttcaaccccggaggggttgccgagatcgcgccactgcactccaggctgggcgatagagcgagactctgtctcaaaaaaaaaaaaagaagaggggaggcgaggggaggggaggggaaaagggggaatttgtttggagctgagacatccatcttctcctgacctcagatatttgcactcctggttatgaagccttcacacttggactgaatacaccaccagctttcccgatttccagcgtgcaaatggcagatcgtgagacttctcagcttccataattacatgagccaatttatatatataaattgggtcctccagaaaaacagaataaattatatatataattatacgcataacttaattaaattatacgtataacttagctatatatataatttattctgtttttctgaagaaccctactgacacaaatgttgagcatcttttcatgtgcttattggcttaataacttgtacatcttctttggggaaatgtctattcaagttctttgcccattttgtaactgaactattaatatttgtctttacattgttgagttgtaaaagttccttatatattctagatactagagccttatcagatatatttctgcaactattttctcctaatatataggttgtgtttttattttctttttctttttttttttattgagacagtctcactctgtcacccaggctggagtgcagtggcatgatcttggctcactgcagactcgacctgccaggctcaagcaattctcccacttcagcctcctgagtagctgaggttataggcacttgccatcgcacccagctaatttttgtattttttagtagagccgaggtttcgccatgttgcctaggttggtcttgaactccctgcctcaaagcgatctgtcagcctcagtctccctaagtgctggaagtacaggtgtgagccacagtgcccggccatctattttcaatagtgttttttgatgtacacaggtttggaattttgataatgttcaattcatccatttttttttttttttttttggttctttctactggaccaccactcttgagccctctaatccaacctccacgcggcagccagagggagctctctaaatgtaattactctttccctgctccacctgctcaaaacagtgtcacatttgtgatttaaaacagtatttctcaaacctaatttgcaaacaaagcaggtggaactcttcttgtatgcacagcatctgatttggttggtctggcatgggtctgggagtgagcacacctaccaagcggctgctggggtaacttgcgttttccactgatgatttcagcaatgtttccggtcccacatgctcctccagaaccttgtactcccccatgaaaaggtggagtccatttccccttcctttatttatttttttgagacgaagtttcactcttgttgcccaggctggagcgcaatggcgtgatctcagctcaccgcaacctccgcctcctgggttcaagcaatgcttctacctcagcctcccgagtagctgggattacaggtatgtgccaccacgcccagctaattttgtatttttagtagagacggggtttctccatgtcggccaggctggtctcaaactcccgacctcaggtgatccgcccgcctcagcctcccaaagtgctgggattacaggcgggagccaccgcgcccggctatttccccttcctttgaacctgatcaggacttgacgatggcatcaacatggtgagagtgaccctgcatggcttatgaggctgggttacacaaggcgatgttgcttctgactggctccctctcaggatacatgcccttggaacccatcctctaagctccttgggagcccaacttagcccatgtggagacaagacagggagagaaacagaggcacccccagccctcagccagcatcaaccgccagacaggagagcaaatgcgccaacaatgattccagctgaagcctcagacagcgtggagcagagatgagggatccctgcagattgcagatgcgtgagcaaaatgcatgctgtcactgttttgaaacaacaatgtctgggggctgtttgttatgcagcaatagacagctgtaacaatgctgttactgctgtattccatgaatgactgcactttgagtagcagggggctagatcactagataagccccatggcttctgtgtatgctatttttctacttttatatccttttcattcactttttttttttttttttttgagacagagtctcactctgttgcccaggtgggagtgcagtggtgcaatcttggcggactgcaacctccacttcccgggttcaagcaattattgtgcctcagcctcctgagtagctgcgactatagatgcacccccatgcctggctagtttccgtatttttagtagagacggggttttgccatgttggccaggctgatctcagactcctgacctcaggtgatccacccaccttggcctcccaaagtgctgggattacaggcgtgaaccactgcacccagcctcattcactttctttacttggctcatttttccttgttgcctcaattctcctctaagatcactttcctgacatttcagcctgggcctgttgccttctctgggtcccctccgcctcctgtgcctcccccatctcagccttgatccctcagattatacttcctctgtccccaccctgaccatcttggctgtccctggatagggatgggtatcttctcccactggtctgggagatctggaaggacaggcctggaaaagacttggtcactgctggaaggagctcagttagtgtggtgctgaggacagtacgggtgaggctggccccttcacccaaactcccactctcttccatagatttcacctctgtggcccaggccataggattagggcaactccccttaaacatcgagtccatcctccaagctgtccttttttttttttttttttttttttttgagacagagtctcgctctgttgcccaggctggagtgcagtggcgcgatctcggctcactgcaagctccacctccagggttcactccattctcctgcctcagcctcccgagtagctgggactacaggagcctgccaccacacccggctaattttttgtatttttagttgagacggggtttcaccgtgttagtcaggatggtctcgatctcctgacctcgtgatccgcccgcctcggcctcccaaagtgctgggattacaggcgtgagccatcgcgcccggcctcatgctgttcttgaatagtgagcacctgttacaagtcgccccaccagcctctcacttgtacccccctcatctctttctccccaagagacagaggaccctggcacttgtgaagcatgacccagaccctggggccatggcatccaacatcctcattccccatgacccctactgtctagatgtagctgccaagagacccccagactccccgggcctctgtctagagtgccaagacagagagagaatgccctgccgcttgcatgctttgtggggtgtccttcccccttccctggctgctaggcgtgacttcaacgttctccccaacccccaaacagcagcactgacaccagctgcagacctggctcaggttagctaatgaggaccaggctggggatggagcctgaacccctaaaccccagtcctgtaccccaccctaatcctggggtctccactggacaaaacgaagcagcttggtttttcgttgttattgtttttgagatagagtatctctctgtctcccaggttggagtgcagtggcgtgatctcagctcactgcagcctccgcctcccgggttcaagtgattcttgtgccgcagcctccccagtagctgggattacaggcgcgtgccaccacacccagctaatttttgtatttttagtagagacagggtttcaccatgttggccaggctggtctgaaactcctgacctcaagtgatttcccagcctcggcctcccaaagtggaagcggcttatttttaaggagaaaactcccgtggaaaggaatcagcacctcctctgtcaacatttcacttctctgaaaagactctcacttccaacagaaagtgctttgtaacacaacaatgaggctgggcgaggtggctcatgcctgtaatcccagcactttgggaagctgaggcgagtggatcacgaggtcagaagttcgagaccagcctgaccaatatggtgaaaccccgtctctactaaaaatacaaaaattagttccgtgtggtggcgtgagcctgtaatcccagctactcaggaggctgaggcaggagaatggcttgaacccaggagatggaggttgcaatgagccgagatcacgccactgcactccagcctgggcaacagagtgagactccgtctcaaaaaaaaaaaaaaaagaatgagaacatatggacacagggaggggaacaatacacacaaacaaaatttagaaacaggtgaaaataattttagtaatatttttactaatactgatatgctcaaaatattattatttcaataagtaatctaaaaattattgagatgtcttatgttcttttcatcatactaagcctttaatatttggtgtgtattttacactcacagcacatctcaatttgcagtccccatgtttcaagcactaaataaccatgtgtgtccggtggctaccatactggacagcgttgatctgaaatcgcatctgtatgcatcaccagcatatttgcagagatccccatctcagcagcacacctgaggctcatctgcgaaagcacctgcaacttctctacaacctcccacatcacctccaaacacatcctcatgtcatctgcaaacacacccatagctcacaggccaatgcctaaatatcattgcaggcaccttcagagaaagcacttactaaaggggtatacttgattccacatctgctttgacctgcaaatctcccttctcctttacatacatttgcatctcatttgtatgtcaatctaaatccactggcagagcctcagatcatcatctcaaagtcaggtggatgtggggctgggcaggcctccaggtgttcctcctcctgcttcctctggggctcttgatcctcctcctcttccttgctgctctcctcctcctcctccaatatggtgaccagttcctcccgcagcgcccccatctccagccccaggctgcacagctgtcccagcagctggacatccactcggcgcaggttcccctgccagtaggaaggggacgtcacagggatgccaccccagagagcaaggggtctctccaggacctgggtgagagcaggtcccaactcatgtcctggccacagcgcctgggcagggtcctcactgtgcccatggaccctaactgccttcctgcttctcagagtgtctcttgatctctaactcttctctttgtctctccatttcattgtccctgacttctctctctctgtctcctccctctcttatctatatctgtccctgtttccctttgtctctgtccccatttattttttgtctttccatgcccctgtctctctgtctttatgtgttgccatttctctgcccctgcctttggctctctttctctcgcttgccctctctctgccctccccaactttctcaaattcagtctgtctctccatctctgttcctgctctccgtctctgcttcccacctctgtccctctcttttgggatctccctgtccccacctctgttcccgtccctcactctatgtctgtctctcggtgtctgtacatgcctctcatgtctctgcttctatctctcagattctgtttttcgatctctggccttctctatttttgttcatttccattcattctcatttcctctctttctctttcccttccaaacccctcactcaccagctcctccctgatccacagcagactatcgcaggcacctccagtgtctgcccctgcagtcctgagggtctgaccagggatttccactggggagacctccctcagggcctgggggggtgggcccagccccggaggcaccagtccagcctgattcagctgcctccacagttccatcgtctctgagctatggctgcaaggagcaggaagtagcaaggtccagggtggcctggtcccctggggagctgtgtgcgtggtggagagtaaagggcagagggagtgggatgggggttcctgggaaaggtatcccaaagtccactcttcagagagaatcagctggccttgtgcttttctttttccttctgaagtctaacctcaactctgctcacagggttcaaacatagcctcttgcagaggtctaactccacccttccctgcctgtctcaggcctgacccctcaggggcgctcagtgtctgtagatgcctggcaccctctgtccttccacctgccccccaccaccacttctccagcctctcctcagcctccatttgacctctggcttgcccatagcttggtccttgcttgtcctcttggcacgggtcatcctagggctttcccaccagtgtgcctttgggggcaggaatggctcccaggggcaccaagacagcaatcccttagctggagtgcctgtgtccaggctgctggcctagggccaagcagccaattctgctgaccctggacttgcctatgggtatattatccctgttgagggtgagggcttctgctgtggaaaagtctgggaagcactgcaggcctctctcggccttggacccttccttcagacccaaggtgcatatatatacatatatataatggtagatcacgaggtcaggagatcaagaccatcctggccacatggtgaaaccccgtctctagtaaaacacaaaaaattagccgggcatgctgccgcgtgcctgtagtcccagctactcgggaggctgaggcaggagaatggtgtgaacccaggaggtggaggttgcagtaagccaagatcacgccactgcattccagcctggcgacagagcaagactccatcttaaaataaacaaatgaacaatatatatatatatgtattttgttttttgagacagagtctcgctctgtcatccaggctggactgcagtggtgcaatcttggctcactgcaacctccgcctcccgggttcaagcgattcccctgcctcagcctcctgaacagctggggttacaggtgcacgccaccacacctggcgaatttttgtatgtttagtggagacggggtttcaccatgttagccaggctggtctcaaacccctgacctcaggtgatctgcccacctcggcctcccaaagtgctgggattacaggcgtgagccaacgcgcccagccccaagtcccttttaccatagaaagtaacatagtcacagtgcccagggattcacaggtatggggagagggttcgttattcagctgccacacccaccttcctaaacctgctgcccttccagtttcctcacgtgcacagccacgcccgtctgcttttagtttctcaatctgttggcttaaccttcaaaacaggcccaggatttgagcacttctcaccattccctctgccccatccccattcatctcttgcctagactgctacagcagcctcttttactggtcccctgcatccacccttgccctctaaggcaagggtccccagtccctgggccaaggaccagtaccagcccctcgcctgctaggaactgggccgcacagcaagagatgagcagcgggtaagtgagcattaccgcctgagctccgcctcctgtcacatcagcagtggcattagattctcataggaggcaaaccctattgtgaactgtgcgtgcgggggatctaggttgcctgctccttatgagaatctaatgcctgatgatctcaggtggaacagtttcatcccaaaaccatccccaccccacccccgacccccagtctatggaaaaattgtcctccacgaaaccagtccctggtaacaaaacggttagggaccgctgctctaaggtacattctccacctggcagaaataatctttacaaaatgtaaatccgattttgacactcccttcttcccactgtgaatagaataaaaccctaccaggcctgcaccgtcagcccctgcccacctctcaacccagtctcctatctctgtctgcaagctggttcccacctcaaggcctctctgctctagaggctacctctccctgcagcgcttttcccctagatctttgaatggctctttccttatcattcacttctacttcaatgtcacctcttcagagaggcctttgctgatggccctacacccagtcacttttttttatctgcttctcatcaaaattgccttgctgattcctttgtttcttattcatcctctcccacatccatcctctcccagcccagaatgttgacttcctgagagagggactgggtctgtcctgctcaccatggtaacctcggcatctagaacagtgcctgccatcacgtggtaggtgctcagtaaatattcttggaactaatgaatgaataattctatccacaagacttcacaatggctcttcatgctgcgatctagctttcaactccaaactggtcttgagatctcacctcagtctctaaccttgacatctaacctcttcacccactctcttacctgaccctaatttttaaaaatgacgtggtcagcttttcagccccctcattccctgtttttaggaggtagtgagtggaagctggaagaataagaaagcttggggagactgcaattgcagtcaggaaagaaaggtactctgccgggaagaacaccccatcttctcctagggaaagattgtggagtcctggggtttgttttgtttttcaattttttgttttaagagacagcgtctcgctctgtcacccaggctggagtgcagtggcgcaatcacagctcactgcaacttcgacctccccggctcaagtgatccccccgcctcagcctcgtgagtagctgggaccacaggcgtgcaccaccacgcccggctaacattttattttttgtggatataaggttgccctatttctttgtggagataaaggctcccctatgttgcccaggctggtctcgaactcctggcttcaagcgatgctttcgcctcggcctccacaaagtgctgggttcacaggtgcgtgagcccgacctgtgtctcgttttgaagctcagggagagggcgctgtgagcaatccctaaaccctttaagagtaaaaagtgcgtgcacctttaagaggacggttagaaaacgcggggcgtggccacaggagaataagttcgcgctgaaccaggagcgtgggataagaccggccccttccggttacgaaaccttagcaagatggcggctccctgggcgtccctgcgcctggtcgcccccatgtggaatgggcgtatcaggggcatccatcgcctgggtgcggcagtggccccagagggcaatcagaagaagaaaaggacaatactccagttcctgaccaactatttctacgatgtggaggctctgagggattacttgctccaaagggagatgtacaaggtgcatgagaaaaatcggtttcgagacaaggagtggatcaggccagataagtatggccatttctctcaggagttctggaatttctgtgaagtgcctgtcgaagctgtggatgccggtgactgtgacatcaactacgagggcctggataacctccgaacctccgcaggctggacatctcggacctccctgccgtgtccaaccctggcctcactcagatattggtggaggagatgctgcccaattgcgaggttgtgggagtcgactgggctgagggcctgaagtcagggccggaggagcagcctcgggacacagccagccctgtccctgcctagcctttagccctgtccccactcacgtggcttctcagcgggctgcatggaatgtctggtagctcaccacacttctggcttccatttgtcttcactcaacgtcagggtgggggagtggtgctggccaatcacaggagagagcgtgagttcccagtatttattcctggctgcccttggctaaaggtcacagctcctgtcaccctgtcaggcagccctttccatgcccctgttcaggcctggggaggtaaaggctcaggctgttagtagccgcagagagccacactcaccttgtcaggagactcttctcaaactgtccttatgtgagtgcactgccatttcttgcagggaccctgactgacacaggggctactactgacactttacagggatggttctcccccgtgcagggccgctgtgcccactgcaggacatgcagcatccttcgccccactccactcactaaaggccagcgcaccccaggccccatagtattgctggttatggatttattgactttatgttccaaattcagctttttcagttggctgttttttgaaaggggataagctttgtcagtagagggcaccgaacaggcattataggaggaaaggcgcctccttcgtggttcttgttggcctccactgaggcacctctctgggaataacgttccccagcaccccaaatggatttccagtcaattcagaagcattttaccagtgaagccctcattattccagttcactgttaaagccagtaattctctatattaaactttccctgttcggtttatactccggagtataaaccgaacaggcctgccatagaaaatgcaaccacagaaataaaatggattgctttttttccctgtagtgaaaatacatttaaatctatctca

SEQ ID NO: 735340 - DNA, 188158 bp, Homo sapiens
ctccaaggctgagggatgaggagacctgctgaggacccagggccttatctttccatcccactccataggtcccagtattgactgatgctgtcttcacctcctagcctcacttttaaccttctggcacccgcccaccactgtccagttcactattgaagccctgccgtccagtgctgcagagggaaaggatgttcttctactggcctgcaatatttcagaaactattcaagcctattattggcacaaggggaaaacggcagaagggagccctctcattgctggttatataacagacattcaagcaaatatcccaggggccgcatacagtggtcgagagacagtataccccaatggatccctgctgttccaaaacatcaccctggaggacgcaggatcctacaccctacgaaccataaatgccagttacgactctgaccaagcaactggccagctccacgtacaccgtgagtgattcccccatacctctgggtgctggcggtcagttctgcttcacacacatgagattgtcaggcctgggctgtgcctgcatccccctctgcattttgtcccgtgttgagatttgggcatttagtgcaggacacacacatggtaggtaaacttcaacagatcagaattcctttcctgcatccaggccctgcagacactgatggcgggggcgggggggcctcagcagggggaggtcagtctcagccaagcaccccatgccctccccatgaacctgaccctgagaaagaccctggagaactgggtcagggcctggcctgagggcgtcctgggaacctcacaaaagcccagcctcaggactcctgactccgtgtgaccccgggaagcctgtgtcagggctggggtgtggtctcctgggcagggcttactgggagcaaggatttaccagatgtctgcgggctgtggttcctgaagcttctcatcagtgagggctcagctcccagagtctcatctagacaaggacagagcctaccactttccctgggactcagcctggagagggcagggggacaggattactagggcattggccccctgaatgaggagcttaagagatgcccttgggcagtcagtggcccaggggtaggaacagaggggagaaaatgttcctggcagcttcttgtccaccggggatcatgcccaggggtgctctcccatggaggcaaataacagatgctgttgatgtgaacacctcctctgtgccaagcttcatgtcagatcctgtgaataatttaaagttcattcacagacaaagtggcaagcctcagaccattttccatttacatattgtatggaggggaaactgaggcacagagagatacagacaccggccacggtgggcagatcgcagctggcagagtcacatgagggctgtctgcagctgctgccacgtcctctccttcatccctggtgccttactaggtgtctgtggaccttagaacagccactggttcggatgttttcttcttaggtgtctacagctcggagggggagattctggtctggagagttatgagtaaatacagaattaatcagttttttcttaactaaatcacctgcctcaacaatcagtcagtgctggggaagttcaggcctcctcgctcaggtccacaccccgcatctctggacatgaaatggcttcgtgtgttttctgatgtgtgggtatcattccaacaggaggataaaggggaggactttgctttctctccccattcacaccctgcaccagccagggcccagtgtgagacacatactccgtagttctctcatgaaggagggagggaatgaatgaaggaatgatctataacctcttcagagacagagacctggatacaagatcctaggaggttctgggcccaacgtgagacacacactctgtagttctcttatgaaggagggagggattgaatgtaggaatgatctataacctcttcagagacagagatgtggatacaagatcctaggaggttctggccacacctgttttctgtccctctagagcctaagacccatgtctcattcatctggcccgtttctcctaaatctgcccctgggagctgagtctcatctgaccctggggctgcagggctgtgggaaggttttcaggggagggatcaggcttgcgggtagtcccacacgtttgccttacaccctggagctctacctggttctcactatgaatatcccataataatcccccctatcctttctggggagtagaaaaaaagtaaatatttaaaaatatgccagagcatctgttcttcttagcaagttcagatagttattagttagcaggaataaatcgttattttaccagagcctcacctgctgggggtttatgggagcctaactgactgaggggggtgggaaatatccaactccagccccctctagccatcatgtcccacctaaaggagagaaaaaactgagaggcacttgtgacattcacagcccagggcacagactctatccaggaccacagaacccctccctccccccactcaccaccgcatcactgaacgcctgctcacccaagttcctgttgcccagtacatcatgtcctggctttcaacaaaaactacaagacagactagaggcaaaaaaaaaaaaaaaaaaaatgcagttcgaaagacagaacaagcatcagaaccagatgcagatgtggcagggatgtggcagggatgttgaaattatcagaccaggaatttaaaacaactctggggccaggagcggtggctcatgcctgtaatcccagcatttgggaggccgaggcaggcagatcacctgaggtcaggagttcgataccagcctggccaacatggcaaaaccccgtctctactaaaaatacaaaaaattaggcaggcatggtggtgggtgcctgtaatcctagatactcggaaggctgaggcaggagaattgcttgaacctgtgaagcggaggttgcggtgagcctagattgtgccactgcactccagcctgggcaacagagcgagattccatctctaaaacaaacaaacaaaaaacaatactggctaatatgctaaaggctgcaatggaaagcatagacaatgtgcagaacagacggatgctgtgagcagagagatggacaggctaagaaagaataacaacagctactatatctatctatctatctatctatctatctatctatctatctatctatctatatatatgtatatatatgctagagatcaaactcactgtaacacctggatctcagagtggttgtgaggatgtttattaggagattaaagagattaaagcagagttatacacagggcgagagctcaactgatgctatcaactagtattcttatttttttgatgttgttattggcaataaaatcaggaacaatgcagtaaaaatttggttttatcatgtacgagttctgtgaccttccttgacttactgaggtactgtaagtctcagattctaactctgcagatggcggtgatgcccctctccctcaaggtgatgtgaggatgagatgagctgtaggtaggttggtgcccactgtgcctggcacatggaaggcccctgaaaatagtcaatgaacatcatccccgctcatcagcatggagttgacagtgagggctcgctctctgtgacaatcatggaatggaaaagaagaaacaagaggaagactgggcgcagtggctcatgcctgtaatcccagcactttgggaggccgaggcgggcagatcatctgaggtcaggagttcaagaccagcctggacaacatggcgaaatttcatctctactaaaaatataaaaattagcctggcatggtggcacaaacctgtaatcccagctacttgggaggctgaggcaagagaatcgcttgaacttgggagatggaggttgcagtgagccgagattgcgtcagtgcactccagtctgggtgacagagcaagactccatccaaaaaaaaaagaaaaagaaaaaagcaacagagggaagaggtgtgacatgagaggaagaagggatttaaaggtacaggagcagggcgaggtgcaagcacctgtgggagaatgtaggagttggtacatcccagtgtgtcaagtctgagacacagaaaatggtgcaaccgtggagagcaagggagtcagctatgaggacagcccaacagaccacactcaggctctggagcatttccttcctccctgactatgcccctgccctgcaatgccccttatggtttcccttggaacaaacttgggccttgtcccctttgccttcccctttctgcagaaaacaacgtcccaggccttcctgtgggggccgtcgctggcatcgtgactggggtcctggttggggtggctctggtggccgccctggtgtgttttctgcttctctccaggactggaaggtaccgcagcttttccccagcctcctcccacccctaggctgaccccagtcagggaggagggagaccccgccctgtattcagggccaggctttccgcatcctcccaaggaatccttccctctcattccatggctcctcccttgccagctgctgatcctaggctgcctcttcctttatgaatgtggcacagttaaggttgcacccctgagtgctgtcctagttccctaacacagcaaagccacagctgcctggagggaggaagggagggagggagggagggagataagacgggagtgctcagaacctggtaccttctgctgttcattgaatttacccacccagtgaggagggatttgcaggcttgagatccatggtgggggtcctgggcatggtcacgcagtggggagtggcaaagcctggacaggctgggtagggtcagcaccccatcgtgattgatgtccctgaggtgtgagatgggagaacctggacctcaggacctgctgtcctttatgtctcttgccaaggggtggagagagagaggacaaggccattgccccatttcagcatctccaggcctgaaaggagggtctggccatggcagggatactgagttctgggagaatatgatacatgctccttgcctccccatgcccccagctcccccagtgtcctgcacacacagccggccctgctttccctctggggccttgacccttcctctcaggcaaacgcaggtggtctgattccctccctgagtcctcagtccctttcctgggtccctgggtcaatgttctcctcacccggcatctgcctgggggggtccttcctctctggccaggacagacgtgactgcttaaggcctatcctcagctccccgtcctcggccgctcctaccacgaaactgatggagacaggaggccttcactccagtccttgaaaatggagtcccttccttgtcctttattctgcccctaaacctgtgatttctccctgcaccctcatgaataatcctgacctttcctagggccagcatccagcgtgacctcagggagcagccgcccccagcctccacccctggtgagtgtcccttcagcccaggtgtgggagcccctaggcctgccctacggtgtccactcctgccagtcaccccctgggggcctctgaccctttctttggggctgcaaggaggatgtcaggaaacatgacacaggggaccccgactgtcttgttcagactgatctgtgggctctgggtcgtgggtcacctcctcgacctcagctgctcaggtctcccctgggaagaggctccctctccctgattctctgggagctgaggacccctacactctcctgcaggaggggcccaggctctcctcccaccctgctgctcactcctgtctctgtccccaggccatggtccctctcacagatccaccttctcggtaagcctgttccctccccagcccttttctactggggtcccaacagtgcaggctcagggcagggggaccatcaaccccacagcacagcactgacccacctttccccagaacagtcaggtcaaagtgagtgcctccagccaggatccgggcctctctacagggccaggaccacccacgccatgtgctgacccctccccgggaccctctacacctgaggagaaccctggagtccagcaggtgcagaatggacactgggaccatcagtcagaggcccacattaacaagggtgcggggtgggcccagccaggacaggggtcagggtgttgtgtccacactgggaggctgagctcaggggcagagctggtcaatcctgaggggaaatgagtggaagtggaggcagggaagtaagtcctggccgatcagagacaggaaccttccaggctgggcttccgtgaccctccctccctgtcccctgacatctcctctctcccctgcccaggcccctctacccagccccagaacagccactcccatctatgaggtgagtgtgggccatggatgttctggtcccgcaggctccaggggacccaggatctgcccccaccagcacctggctgagctcagattcaggaaaatgcagtgaaaatgagaacaggtggtggtgagcagaggagggaggggcctgggaacagggaccccctgagcacagccaggttcagccccagagaagccctgggtgggcccagagcctgggagatgccagacactgttctgagaaggctacaggggttgaggcctcttctctgtttttacaggaattgctatactctgatgcaaacatttactgccagatcgaccacaaagcagatgtggtctcttaggttcctctgggagctgctcttgtgggttgatggagcgtccccaaagctcccagccctggggacggggaaggacatggagcctgagccagagaaccagctctgagtcctgaggagacacaggcctggggacagggagggatgggagtccctgctgaatatctggagaccctgacaggttgccctgggctctgggtgggccgggacaaaggcctctcatcaccacaggaagcgggggcttgcaaggaaagtgaatgggcctgtggcccacccggggtcaccaggaaaggatctgaataaagaggacccttcctctcattggctctttttctgctcacgggaacttagcagaaactcacctgaaactccgtgtccattctctcccgggtcacacagggaaaatatctccaccttgtctcaaccacagtctctcttccctgggaggcagaaataggggttgggagtcaggctggggtgggccctacacaggaaagggcaagattcacatgagccctgcccagccagccgagcgctcagctgtcctcacactaccccagggaccaaggccatgcacagccccagcctgggtccctctgtgaatgcatgtggggtctcaggagcacagaagatggggccatctgatgtccacaaaaggtgagcaatgcgggagcaaccatgggtggtataggttgcggctgtggcccctacgcagcctccagtgtcctgacccctgctgccctcttcacccaggccctggaggcccagtctatcactgtcctccacaaatgaacttacctgtccccaaatccaggatcctgtgtgcttatacctggccactaggttctcctctgtcccagtggctactgctcaggacatctttatccctggtggggcacagagaggggctgtcagagcaaccaagattaatacagacgcataattcagtccttgagcactacccaggactctggcccctcattgctcatcagttcccactttaccccctggcatggatctcactgagcaagccaactctttacacaggagcatccaggtcagaggtgcaggactcccccatctaaagctcatgcaggctcccatggcgatgggacaacctgtctgctcctctccctggcccacagccctatctcgcctgcagctcctccacacacctgggacagcagttctcagcccttccctgagggcccctggaagggtgatgatctcatataggttcacttgaaccaggtgccaccttcccacaagtgagctggtgcctgcactaaagcacagagccacagttcccaagagtgttctgccactgccacaggtcccaagagtgttctgccactgccacaggttgttcgtcctgagatgagaggtaagaaaacaacccgcaatgggttgttttatatcgggatttgcatcaggatttagctctaaatgacccctgatcccacctgcacacagcgtcagatgagacaaggtgaggcctctttagttttctgttgaggctgtgacaaattaccacaagcttagtgacatagaaacctgaaccaaagtgcccacatggctgtgttctttctagaggctccagggaagagtgcatttcctctccttttccacctcctagaggcctcctgcaaccttggctgtgtcctctttctccatcttcaaagccagcagcacagcatcttgaaactattctgtgccctgcttccatccccacatctccacctcctcccacctccctctctcacttaaaaggaaggagccttgtggttattttggacgcacctgggataaaccacaacaacctccccatctcatgatccttcctttaatctgtaaagtgtcctttaccacgtgacatgtccacagatctggggatgaggatgtacacatctttgagaggcccttgttctgtccatcactcctctcaaggccatcttctcatcatcgttcactacaaactacacatgggcacctggatgggttcatcatgactgtggcgtcagttcctgcattaacatccccagcaccctccagatcctgagagagggagacggagggctctccatgcccctagtacctctccaccttcttcttggtgacatgcttagttgctaagaataacagaaagcggaggtgactgaaagatcacaactcaccggcccttcaatagttcgtggacatcagcaccacggacagtgactcagtgaggctaatttccaggtggcagcagggagcatgcagataggagggaactgcaggaaaagctgcccattctattctatatgagaaagagtgtaagaaagaggaagctattacagggataatgctattcttctctaatccataaattgcgaaacctttgcatgtctggatatcatggtttttagcacatctgctgccactccctgcagggctgattgctgcatccaggatgtggtctcttggggggctcacagcctgctttggcctcatggtgagtctccctgcccctgacactcaggccactgtctctgcctacaacatggtgggaaccttccatgattaacgtctgattctctgtgcctgacctttgaagcacatccatcactcagcctggagcatccgctgagctcagcatcctgctcctccatccccagctgagcccttgaggagatgcttgagaggatctcctgggctcctctgtgagctcctccaggctgagccttgtgcttggtgtcagaggcctttgccatctgcttgttctttccataggcaaataatcctcctcagggacaagtggggcctgaagatctgtctgaatatctatctatctatctatctatctatctatctatctatctatctatcatctatctatatgtatgtatatatgagaatgctttattaggcaaaactgcatactatgaacatgctttaaaatgcaacaggatgagatgtgaagacataaagaacaagtgtgtagtgacacatggctatcagaacacactgaagaatccacaccgcggccgagagcagtggctcacgcctgtagtcccagcacttttggaggctgaggcaggcagatcacttgaggacaggtgttcgagaccagcctgaccaacatggtgaaaccccatctctactaaaaatacaaaaaatttagccgggcctggtggctcatgcctgtagtcctggctgttcgggaggctgaggcaggagaattgcctgaacctgggagacacaagttgcagtgagctgagatcgcaccactgcactccagcctgggagatagagtgaggctccatctaaaaacaaaacaaaacaaaaagaatccacactgcttccccgcttcactttacccagaaaaggaatgttctaggccacttcctcttcagcacacatccccagggaactaaaataggttcacagtcacccccatcttcctcattcccatcacctcttacccacagaggcatctctggtcctacagatccagccctgccttcaagaggcacaggtccaacccatccagtgtccctgctagtcacacacagcactcagggtacaatggagggcttctgtgctttggatgggaacaaaccccacctcacattcccacacctgagaagccaccagggtcctctctgtcctgtcctcacactcaatgtctgtcctgggtcacccttgtcatctctcctggaaataggcatggctcctgacaggtaggattgaggctttgtcttttcaggagtccctcccactctgagcacatgaaactgctcagctccatgcaaccctctctcaccaggggccttgttctctgggtccctgaatacctgggtccatgccatgtacattttaagaaaaatgacagtgactctcaccctgacatcctcacccaaggcacgtgtctgacaagaatcaccaggtgagatacctgtggctccacacacctgaggcttcactgcgcaggggtgtcctcatccctctcctcccacccctagggacagtaagcaccacaggctgccttggaccaccagctccccctcccagacacagcctcagatctatactgacatgctacatggagaggctctgatgaacagcaggtattaggaaatcccaccgaaccaggtgccacttgcggccccactcctcctcatatctgtgactgggacagacacacataacacacctctgttcaccgcccagcccccaaggtcaatcacagtctgcttctcccctagatccactgctccccatgtcttccgtcctcagctgcatcctgggtggcctccttgctgttcttgtaccccagaggcaggttccaacctttgtgatgttgcctgcaatgcccaaactttcccttccccttccccttcccttttcccctcccccttcccctccccttcccctccccacccctatcccttcgtcttcccttgtcttcccttcccttccctataaagccaaacatacccatccacctaccttgtggtcaaagtcatcagcctcctgctccactcagtgttctctgaccctgcatatggaggtggtggcccctcctagaacacccaccactcactgtcagccttgcgtggtaatcacagattttgcaggggttacctgtgttcaggtgtgtcacctgtggaaccagaactcttggaaggactggcagagggagctgcttaggatatctcagggctcctggcatctggtctaccacagggctattaacaacagcacttagggacaaggtggaggatggacggttaagagggtaaatatggatgatgtgtgggcaaagaataggacacaggaacacatgcagtactcaaataattatgccaagaaaggtgaggacatggagatggacattcccatatacttctgatgggactgcagtttagtccctacagcaacattgacctcatcatgtttaacgcgcacacgctctgaccactatcctacttctgaaggcctccctgtgctgtgagctctgagaaggccaagcttgcctgttctgtctctgctaaagccagagaccagccaatagcccagcacagggtacttcataaatacatgttgaaggaatgagctccaggaacagtactccacatggtagagatgtgtgtatgaggatgttcactgcagaaggtcatgtcaatgtgacaagtgacgagcagcctcaaatccagcaacaggggtgtgggtaaaagatcatagtgtagccatgcaatggaaccaatgaaaaaaccacaattagagcaaatccacatgtattaataaaggaggtgccctccatacatgctgcacctaacagaatgttgccaaataagaatgaaaaatgatgatatttgggctgtaaaaactagaagtcagctaaataagaatgcatcgaaagtatttgtgaatgcttacaattttataatgccttggcatccgttttggatggaagttggactttctcataccagaagcagggctcagtcacctttgaaatagtttccagttctccacctccttccagttcctcagtgtgattgatcagatatctgatttatacaactgcctcctggtgacctcctccctatgggacttccggatacagcccgtatgactgccccactgaccccacaccctgcctgctgcagtgaccacctctaattacctggatctcatgtctgcttgcattaaatccaccaattaaaactccctgaggacaatctgtttgaataatattctgtaccctaataaaggccttgacccatgggttccccctctgtcctccccatactgcccctgacctctgtgtgtgtgtgtgggtgtgggtgtatgtgtgtgtgtgtgtgtgtgtcctccagacagggcctgtatcccccaggacctgtaagtaataaatctttattttcatcttatgtctctcgcaatcattggcaagagctctgcatcttaaagatcgcaaatttaagaaattggtgtagtcggcacaatagagtacctcttctgtttagcacaagatatctcggagctgctgaggcttttaacatcctcgccggtgtggctgcctcactggtgaggccgttctgttcagtgcaattcagttgctccactgtgtgctgctgtgttgctgctgtagagtgctgccatgttgttctccccaaattgttaccgagtaggaacctgtaatgtgctcccaaggtggtctaccccatgagaagggggattctccatctagggcaagggctaggtgtgtttctggaatcctaatagggaaggcatccacagagggtgaactccactcctccttagagtgaggagtgacatttcccatttattttccccatggaggtgccatgtattgactttttctttcactgtcccaaggttgagccaaggtgagctatggagaccagggcaagataccatttctgttagcaaagcaaatgggtgacaacgtgtggagaagctgtggttctcctgatggatatagcagagtgccatttagtaaaatcttgtcaggaggctgcccctggttagaccggcagtgtctgtagtcactaaggtggatgcgaattttaggccctgggccatggataatccctgcagacacagccgtggcttcatgtgatggggcaatcccgggctagtggctcccttgtttctgcatttcttgctgtggttgcacaatcaacacctcaggggttgattgggtcaccttggaaagagaaacagctgcctaggaggctggtgcacatggaggccaccctcaattttattctgctaacaagttgtaagattaaaacaacagggggctttgggtaccatcaggaacttgtcaagtaaacatccaaagacagaaagaagaaaaagaaaaagacattaaccgtctagaaatacaagccattttaaagattttgcttaaaagatgcgcttgggctgggagcggtggctcacacctgtaatcccagcactttgggaggccaaggtgggtggatcgactgaggtcaggagttcaagaccagcctgaccaacatggtgaaacctcgcctctactaaaaatacaaaaaattagcagggcatggtggcaggtgcctgtaatcccagctacttgggtggagaatcgcttgaacccgggaggcagagacggcagtgagccaagatcgcaccactgtactccagtctgggcgacagagtgagacttcatctcaaaaaaaaaaaaaaaaaaaaaaaaaagacgggcttgtttcgtcgttgtggagtcatcccagagagaggctactccctagagtcactgaccacctttcctcctccatcttttcctcttatcattctagagacagaaaacaagaatctcagctttaggtggctaacctcaccccccaagaaaagaaactaccactttgattgactacaaatccaagaaaaataaaagagaaactttaaaaagtactgagcaaaccacaggtctagcaaacataatgctagccctaggttacttattcatttacaacaaacccctagatataggaggaaaaaataaaaggtaattaaatatatacacatacaatattttaatataaatatataataaatagttaaattatgtatgtataatatgtaactaaatcaaagtaaaatttcatactttgattctattggaaattcaaaattcatttattaacttatatattaaggaatttatgtaaaaaaagatttttaaaagggcaccaatttgcttttgtgtctctacaacataggatctaatttaactttacatttgctaaatacactaattgacaaatattcatggatttaatcaatactggggctcaaattgtagccacacgtgggaatcccataaatttaaacactctgtccctattatcttgagaagaaaactaaatataaaattgaaaaaaacaggtatgtctcaatttacctgtaactttgcctaaatttcccggagtcatatacccattgctgtaaaacattctctattggacataggtgctctgagacaataaataaaatagaagtgtttttggtacttagacattggcttgacaaaatgggatcccatgaaacctcagttaagatagtgaatacggcccaatgtgagttgaaatggggcctttaaggattaaaacttattacatgaaacctagtaagtaatggggtgattatccatactgcttctccatttcatagcccaattttgacagttgtcaaatctggaaaaaacaaacaaacaaacaaaaaaacccctgggaatctgttgcctcacagagacacaaagtagacatcaaaattgtatatctcagttccagttccaaaatggtggcatagaagcaagctggctttactccttcacacagaaaaccaaaaacaaatatacagcaccaaaattattaccagatatattccagaactcaaatatgaaaatgaaacagttttcagagccacagagaagtgaaaaaaactcccgacagatgacaaaagaatcagatttccccatctgtaatgtccctccctgccccattctgcctggtaccaggtgtgtggaaaattttaccccaactcatggtttctacactgggaaatgtaagatcaatgcgggcaaccagtttctgcacaatcctgggttccctgtccctgccttaacccacaagaagcattgtgagtgcccgaagggagaaatttccctgaggacagtcaaagagtggggaggcaggactaccatctccttccctggaaactctgctgtgtaactcagccaagggagacatgaaatcagactggtgtttcagcagctccatgttgtagtaggtttgtttcacaggtatcctgggcatggacatctagccagctttcccacactgccaggatatcccctttgggacctccctcagttaggaagggcacactctgatcatttactagggccaaggtaaaccctaaaggtaacttagagatgaaaaggaggtagtgacctagcagtaaagaactctaagaaaatctatccaataaaaatcaaaacaagccagacaaagactaaaataaataatgaatccttcaatgtaaagacctggacttacatccacaagaaacagtaagcaggtaaccatgatctccccacatggacaaagtgaggaacaagtgactgatcctgatgagatggtgatgtgtgagctctctaatcaagaattcaaaactgcagttttaaggaaactcaatgatcttcaagaaaacatggaaaagcagttcagaaatttatcagagaaatttaacgaagggattgaaataatttaaagaaaacaaacaggaatcttggaattgagaaatatatttgctgaacaggaaaatttattagagtctctcaacagcagaatggatcagaggaaagaatcaacccaaataagactcccccaaggcataaaataatcgaattctcaaaagtcaagggcaaagagaagattttaaaacagaaagagaaaagaagcaaatggcataaagaagctccaattctgtggcaacagattttcagtggaaatcatacagaccaggagggagtgacatgacattctcaaaatgctgaaaaaatattgacatttgagaatactttatccagtgaagttatccttcaatataaaggagagagaaagtttcctagacaaacaaaagctgagataattcacaccatcagactagtcttcctgtaaatactaaagggtaaatactaaatacttcaatgtgaaagtaaaaaaaaaaacactaacatgcaaaacaaccacaacaacaataacaacatttgaaggtataaaatccactggtgaaattaagtacgtagacaaacccagaatactcaaatagtaattgtggaaagtaatccaatcataactctagcatgagtctcaaaatataaatctatcaaaaacaataatacattttaggaggccaaggttggcagattccttgaggtcaagagttcaagaccagcctggtcaaaatggtgaaaccccatctctaccaaaaaatacaaaaatttgcagggtatggtagcacatgcctgtcgtttcagctatttgggaggctgaggcaggagaattgcttgaacccaggaggtggaggttgcagtgagctgagattgcactactgcactccagcctgggtgacagagggagactctgtcttaaaaaaaaatagctacctgtttggagaaaggtaatataaaatatgtaaatagagacaaagtcaaaatttgcaaaggatgaaattaaagagtagagtttttttggggggttttctgtttctattattttatttgtgatctaagataagttgttaccttttcttctcttgaagatactttgttatatctatgtttttggaagtcttatggtaactgcaacgcaaaaaatctatgatagatccactgaaaataaaaaacaatgacttaaaacatactaccagagacaatcaaccacaaggaagacagtaaaaaatgaagaaaggaagaggggagttacaaaacaaccagaaaacaggcaacaaagtggcagtagtaagttcttacttaaaaatattgaacactgaatataaatggactctattctccaattaaaaggcatagagtggctgaatgctgcctatatgctgcctacaagaaaccacttcatgtaaaaagatacaaatagactgaaagtgaagggggtggaaaaagatatttcatgcaagtggaaaccaaaagagagcaggagtagctatactgatatgagataaactacaaatcaaagactataaaaagagacaaagaaagtcactatgtaatgataaagcgctcagttcagcaagaggagatgccaattataaatatctatgcatccaacacttgagctcccaagtctcccaagtatttaaagcaaacaatagtggatctaaaaggagagatagactgaatacaatattaattaggggactttaacaccctgctctcagcaatggccagatctttcagacagaaaatcaacaaggaaacttcaaagttaaactacacactagatcaaataggcctaactggcatttacgggacatttcactaactatctaactgttacagaattcacattattttcatcagcacatagaacattcttcagaacagaccacatcttaagtcccaaaaccagtcagaataaattcaaaaaagtttatatcacatcaagcatttgttctgaccacaatggaataaaactacaataaatgaataactttctggacacatacaacctaccaagatggaagcatgaaaaggcagaaaaacccaacaaaccaacatgaaactgtaacaaaaggaaaacccaggaccgaatgacttcactgctgaattctaccaaacatttaataagaactaaaaccaattctactcaaaatgctttaaaaaattgaagaggatggaacactttcaaactcattctacaaggtcagcattatcctgataccaaaaccagacaaggacaggacaaaaacaaacaaacaaacaaacaaacaaacaaacaaaaaaacactacaggattgcttgaggccaggagtttgagatcagcctgggcaacatagtcagaaccaatctcttaaaaaaaaaaaaaaagaaaaaaattagccaggcatggtggcatgtgcctttagtcctagctactcgggaggctgaggtgagaggaccaattgagcccaggaggttgaggccgcagtgagccatgtttgtgtcactgtactccagcctggggaacagagcaagatgctctctcaaaaacaaaaagcaagctgggtgtggtggctcctgcctgtaatcacagcactttggaaggctgaggtgggagaactgcttaagcccaggagttcaagaccagtctggacaacatagggggactccatctctcaaaaacaaccaaccaaaacaaagccaaaaaagaacataggccaacatcactaacaaacatagatgtaaaagtcctcaataaaatattaacaaaccatgtttagaaacacatcaaaagagatcattcactatgattaagtgagattcatcccagggatgccagtatggctcaacatatgcaaatcaataaatgtgatccatcacattaaagagaaccaagaacaaaaaccatataatcactccagcaagtgcagaaaaggcatttaataaaagaatgggttgagggagtggagcccatagtcagagcagcagtggtctgggattttggaagtagaaagaagggcagcaccactggccaggaccaccagggaacacccccataggccctgggtgttgtgctccagggagggttccctctggagttattaatcttggtgtccactttgcccagctgcccctcacagggtcagggaggatgaagggaaagcttccttctaatgaaagttcagggactcacagttcctagagcctgtagggagaggaagatcttcgaggaagagcacctgggcattggggcgtttgagaggaagatctatgccaggtccaagtggacaacctgtggactctctctccagggacatacgggtatctgggaatctcctgtagcttaaagaggtaaagacctctccctttagcctgaggactggaggatgctggttcaggtgaatgagtcctgcaggggctggtacaggcctggagggtggtggtgtccagggccttgggttcacccttagcatgattcaggccgggcggtgtttcacatgagcaagagggcctgggttcattgcttcaggacaatggtgaaatctcatggtggaagaaatcttgtccttgccagtgcccagctttcatttggtcttggcccagagtgtcctccctagagaagactcttgtcccttcttcacactgcccttcagggatatgccagccttatgggataagatggggtggagactgtagatgtgggtgggaatctctccacagagtgctccttctctcagcggttgcaccttgtctcagggcttcagcttgaaatctgggatctccaagcccttccctccccagtcctggccaggaccacatgggcagatgcattgtgtgaagtgcatttcatttggggtgtcctctctgcatggcaccctcccgttgattctctttgcgcatgtcagagtgcaggcaccatccacacctcctgctggaggagggacggagctgttgactcctgagagctgatcatgtgttcccaccctcacacacaatcatggtccatcctctgagggacatgtgttgccaccactgtggagatggtgcaactgacagtaacaaacagtaaaatctggtactgaatgggaccttaagccaacaatgacaatgtcattccaaggtgtttcatttttattgattcaatgcaagtcacctgatttcattgactattcacaatagctcgataaagtaaatgcatcatcaccaccactttaaagaggaaaaaggtgcttgggcagtttgtgactactgtggtggctgctgcattgctctctggtaaagccaagtaggtggtgggtgcggcctctgggctgggatgatccaccctcctggtggtggcaggggagccaagctggagccatggcctgtgcagtggtagcagctgaactgaccgctgctgcaggatttgcaagctgttacattttgcgaagccatgaagcacataaaacctcaagtagaacaagtgtttcaaagtctaccaaaatctgccttcagagattattactacagaggtggatatgaacccaaaatgacaaaacgggaagcagcattaatactagataatgaatgaacactagtaatagtagggtaagccctactgccaataaagaaaaaaataagagatgctcattaacatgttatgctcttaaatcacgcagacaaaagagggtctccttatatagtagccacaatcaatgaagctaaagatttactgcaagatcaagctaaaaacagtaggtgtataatgaatttttaacttcatattagtttatgtatatgaatatcaagtttttataataaaatgcctccaaacaaagaatatttgatttagggtttaataacttctaagaggggactcagatgtttcctgtttcacagtcagtctgagagggtcatttttcctggagctgacctgggtggaggcctcacactgatactccccagcatcctctctcctgatggggtttatgctgagcatacagtggccctgggacagctccattctctccatgagtcacagacgctggtcatggaagatccactggataaggttccagagtcatctgtggggcaggtcaggatcacaacatccttttcttctgtgactctggtgttgctgactcagatggggtcggagccactgaccctgtggacaatcagtggaggtgctcaactgaaagtgggctgagggcacgtcttctcctccatccctgggtccttaaggtaactgtggaccccagaccaactgacacaggagctagaaagaaattatttaggaagttagtgagggtaagagcgtccttggcaaggtttcccctttaacaaaaagcagcccaagataattccttttctaacaaagagcagcctgaaaaattgagctacagatgtagatgagcaagatggaagcttgcacaggtgaattccagtaggtgtgccaatagaaaagggctgcctggaagccaggtatgttcaacatggagactccatcctcccttttctccattaccacatgtacagtaaaaaaccaggcaacatggcaccggccaggtagacaatccatctgcatgacaaaagatcagagtggggcagccagcaaatggcacagctggtctaaacaatctttcaccccctgtataaatcagacactgcctcctgaagctcatctataaaaccttctgcatttcactatggaagtggcaacccattttccccaggacccctctctctgtgcagagagctcttctctttctttcccctatgaaacttccactcttaacttcactctgggtgcctgcatcctagttttccatggccatgggacaatgaacctcgagtattaccccagatgaatgatgctgtttcacaatcactggttcagctcccttcttcttagggtttcacagctcggtggggagaataccacgcctcagtggtctggggagtgaggaacaaatgaagaattaatcagattttacttagaacgctatcacctgcctcaaccatcagatccatgttgggaatgtccaggcctcctctcttagatctatacccacttcactggacctgaaatcctgtgtttcccgatgtgttggtgtcactcctatgagaggataaaggagagaactttgctttctctccccactcacaccctgcacaagacagggcccaatatgagacacacactcgctcagtagttctctcatgaaggagggagggagtgacctcgagtgattctgccatctgtagtctgtgtaccctggccagtggctgtatcttcatatgcctcagtttcccctcagtaaaataggacacacaatgagaactaaaaataaaattctaattccccagtgaactgaaaggatggcctcttggccaagcggatcccagagttcctgatcatgacaggatgggaggttacacctcattacagcccctccctttggaagtttagaggtgacaactgactagcattaacgctaaaatcgagatcatgagactgacagaacagactctctgtggccataagataccaaattataaactcaacctaaggtcatgcaggcaagggctaagccacactttcctacatttaaagaataagctatgttctaacacagaattttctttctctctagcggctaaagtaacactagccttcgagataagcaatattgaaatgatcgcggctcatccaccaacactggctaactgacccctgttccaacagccacaactacacttcaattggacaggagactgatttcagtaactttctcctaataagagaccactgagcatggcctggttctgctggtatacagacacggtgcactgagtaccataatgcttgtttcatcttttgatgtataagacctaatttaatacatttaaatctgaattctccaccccaaagtgaacatggggtgcatgtagcatgcatgtttgttgatcacgcatgtgcgtgtacttcctttgtgagtatccatagctccacctataacctgttgaatatgtatacctggccaactcattcagcataaatctatcttccacattcccctcccttgaagtgcctgctattggtctctgctggaggctgcatcttctaccctggggaatggccagcctgcaggctgtaaccctgtgtaagaaataacctggttgggtgcagtggctcacacctgtaatcccagtggtttgggaggttgaagtggtagaatagtttgagctcaggagccagagactagcctgggcagcatagcaagatcctgtctcttaaaaaaattttagggaggagagtgaggatcagaaaaaatacctattggctattatgcttagtacttggatcatgaaataatctgtataccaaacccctgattacatatataacaaacctgcatgcgtatctttgaacctaagataaaagtttgttttaaaaactatctgggtgcagtggtgcatgcctatagttccagctactcgagactgaggtgtgaggagtgcttgagctcgggggattgaggctgcagtgaattatggtcccacctgtgagtagccacttcactcaaacctgggagacagagcaagaaccggtctctaaaaaaaaataaaaatagaaaaataaaatgaaaaatatatgaaataaagtctcctttccaaacgtacagatctccgatttttctgccaacaatgataaatggtcagtggcttgccatgttgtctgtgaattacttttaaaatattcacgatcacctgacctaaaggttggtaccaaggaaccgcctgaatacaccgtctctgattatttgcctccaacagagtgttccctgggcctgatctctggtggacaatgagctgctgggaacatcctctcttctctattcctcccctggggatgctgaccttcccttggagtctcctaagttccccagggcagtcggctaatgtcctagggagcttacctgtcttctccataccaagtctcatgtgaaggacgaggctttgcccttgcccagatgaggctctgggggctgagccctggctggctaccagctgcaagagccatggcccttggacagctggtaaatccttgttcccagtcagccctgcccaagatgcctcaacccagccccggcacaggcttcccagggtcacatggagtcaggatcctgggacaggggactggacaggggtttccagggctgagtttctgaacaggggcttcccaggggtcccctcactccaggatctgacatggtcctacaaggaacgtccatggggaggggacccaggagggggaactgacactgacctccccttactgagcctccccccaaccccatcagactgtccttcctctgtagcaagtgcctgcagggtctggatgcaggaaagaaattctgatctgtggaagtttgtctcccctgtgtgtgtcttgcactaaatgtccaaacccccaaatgggatgtaatgtagagggggacacaggcacagcccaggcctgaaaatcctgtgtgtgtgaagcagaactgacccccaacacccagagctcatgagacatcactgtgtacgtgaaactggccagttacttcttcattcacaagatctgtttttatgacttgtagggtgtaggatcctgtgtcattgttggtgacattctgtatcagcagacatgtattggggtatattgtctctcagcctctgtggcaggtcctggggtaattacttgagttcctagtacatatcctgtaattcccctttgtaccagttgtagccaagcctaaggcagattgtgggtgagtggaagaatctccttgccttctgcagcttcaacagtgacttgggcagtggtaggcaagttccagaaagttaaaagtgaggctaggagtggggagagagcatcagttaatactgggccctatgcattgaggtggaaagatggggccctaggtcctggacaggtctcttcatccctcagccttggagtgtgtgtgtgtgtgtgtgtgtgtgtgtgtgtgtgtgtgtgcgcgcgcgcgcgtgcgtgcgtgtcctactgggccaaggtcagcagcatgacctcccttccttcagtgcctctgaccttggcatttccctgtttggagtccttttccccaggggtctgcctggctccctccctactgccttcaggtcctgctcacattagggcatccttgggagaccccttccctgacacctctagagaccctgggtcttccctttctgacctttcgctgctgtgttccctccagggctcttgtcaatacttgacctcacattctagatacccttgcatgtctgtcttcctccctatgagagcatgagctctgtgagaacagggacttgtgtgatcttggttgcaccccagtgcctgggacaggctgcggactcctgtggatgagctcatgagtgttcccagggcccttcacaacgtgggatttattttccaatggctgaggttgttggctaagagctctgttggagttcaatcaggctggtgggaaaaatattagagatagttatagagatagacacaaatcttcttggaagaccaaaaagtttgcataactttggtaatagatctgactgaaggtggtccctttacctttagttaaacaaattaaagtagtaacaaaggaaggcagagtagtttgtctagccagcttgtttactcatgtgatcttaagactaaccattgatgtgccacaggtgcttaattgctttctacttgggaagtccacaatgtcaattaccctctaacggtgttgactcaagcctttgttaattaatcttactgaataaatatgagtctcactagctgatcaaggccatggtcacaactgtttataggactcagcagggagtctgtaagcggccctgacagactcagctggactggcaaagcaaaatatgtgtgtgtcagtgtacactattcacccgtcccccacagctggtgcccctatatgaggagtgctgccacagagctctgtttagtgtcccttgttttttttcttgagtattaccccaacttaaattgtgattattgtcatctgttttcaacattaactgctcagtgatgattcacttggaaaacattaacaatcgagattgtttcttcactaacaacctcagattatttagattttcctgttgtaatcccttcttcctgtttagtgtccaacagaagccctctgtccctctcaggtccccgttctctccaagaaaccccagccagtctctgtgctccctcctcccatccactcccagggagccctcccctcacctgtgagcagaagcgcctgccagggatgtgcactctgtgaggaggggctgagggaggccccatgggctctgctgtctgctttgtcctcctctgtggagaggagcttgggcttcagaaaataaggaggccagaaagtaaggaacaggctgagaaataatggggatgtgtcgaaaggtcacagatgccaacatctttgtcctatgcaatattatccataaaattacaggtttgagatatgcttaaattttcttctaacatgcattaaaataaacatataacttttaatagttatattaaattgtatttaatataaattaaatgctcttgtcagagctactgtgactgtcagctctgctgtccttcctctctctgtgctaagcctcctcccagggcagaagcacttcccagggccaggggtgggggcggggaaaggtaagtggcaatgaggatctgcacaggtagcctttccgcctcctcccctctcagtcctgcctccttgtcttcttttcctctttttctccaatctacatttcagttccttagaccacgctgtgagaagcaaggcttattgggacccccatcccttaacaggatgacctgtgctccccataagtgacctctgctgtgtctagggattggctctgtcagcacctcacagagagtccctggggcccccaaactcagtgttattttctctatgacacagaaacccctctgggtatgcaaggttttcctcatgttttctaatgtctgggaaggttggatttactcccagcagggaggtcacagagatgtccagggagtggggtcctagaaatggacaaatctagagctaaagcccaggtctacgattttcagttgtttttttctgcagtgctatgtgaccctaatttcctaggagtaactaaaatgcaaacctcagacatttgtagacattttatgatttttctctacagcttgtaccactgttattattatttgctttatgctttttcctaaataaatttactttacaaaacatccttgtcctagtagggtgcaggggctcacgtctgtgatctcagctgcttgagaggttgaggtgggtggattgcttgaggacgggaatttgagacaaaacatctttgtcctatgcaatattatccataaaattacaggtttgagatatgcttaaattttcttctaacatgtattaaaataaacatataacttttaatcatcatattaaattgtatttaatataaatttatatacaatacatttttatataataaattatatatataaatgtatatataatagtttttcttttttgagatggagtctggctctgtctcccaggctggagtgcagtggcacgatctcagctcactgcagcctccgccttctgggttcaaacgattctcctacctcagcctcccgagtagctgggattacaggcgcctgccgccacgcccagctaatttttgtacttttttagtagagatggggtttcgccatgttggccaggctggtctcaaacacctgacttcaggtgatatgccgcctcggcctcccaaagtgctgggattacaggcatgagccaccatgcctggcctatatattttatataattatataaagttttctataataaattttatataataatatataaaatggatatttatttaagataaagttattagttttatatatttacatatatttaggaataaatgtgttactgtgggagcccagtgcccaggcaggtagtcagtacatgatggttgtcattagggttaatactttggaattctggattttttcccaagagagtgtctacgctggaatattgggcttgtggctttctgctgatgtgcatgtgtgaagaagctacttccacttattaggacttgtgtatctgtctcgcagtttcactacctattttctcgtgatgttggtcaagtcgcctaacttttctgtgcctcatttacctaatttgtagaatatgggtaacagtacacaagtgtgagtgtgtatttcccaggactgaccactagagggcgtgaaggcaccggcacttactattacagcaatgggtgtagtagtgctcatggtcgtaaacatcattctcccatgaaaggaaccagggcttcctgggagaaataactgattccagggctggggccggaaagcacaagcggagcctggagcatctcgtgaggccagaaagtaaggagccggctgaaaaataatggagatctgtcgaaaggtcacagatgccaaccagaaggagctttgaatgaccaattttgagacaaaatgagcactataagaaataatgatagtaataaattccaacccataaatacccatgagttcctactaatataaataaataattgaatacataaatatataaggatgaagaaacagctttttcttacagcagaattccaattaatgaatgtagaaggaatgatcaaatagaaaatcactatttggctaacagcacagtcaattgtttgtaggcaagaattatcaatggactttaaatatgaatgggtaaaagtatgatgatgctacaactagtgagtaccaagggggaaaaaaaagtacgttgagaagaaacaggctacttccatattcccaaagtatcacttcaggagctacttattgattataatgggacaaatagtaacttacagtagagaaacctggcaacagagtctctccgaggtacaaaggctctcttcaggaaggaggtaaggggaaggaagaagaaaacactgtcctgcctcaattatttgctttccccattctcaagtgtacttcatagacattcaaagatatgtgttgatagtgtccacgatccacatggctctattatagtcatttattcacacatacattcagtgaggctttgagtgcctaatgtgtgcctgatatttgctagatggtggatgctgagaagatcaggtgtgctgctgtctctagggtgactgaatccacctgccccactttacagatgtggaaattaaagtgaaaaggatttataggattagttcactgtcacaaggtcactagccttaaagttacaggagtaaagcaagtttcctgacttgctagattttctgctgcaggtgctgacaatggtgagctccaataggagagaggacactcagagtgaagtgggagccctgaacaccctggattagccaagaggacatgccgggtccagctgtgaccgcacaaaggaccattggggatatttgtattctctttttcacttagagcttgaaatgaggaaaactaagtgcagaaaaccaagagtggaagatttttcacaaagcactggtaacatgcatcagaaaaccctgtgctgatgtctgtcacggtgtttctcactgaacggtaatagtctggctttgagtgtgttccctctacagcctggagttctgcgaggcagggaccaggtgtgattcatctttgtctctccagtgacagtacacagcaggctctgataaatatttcttacaaaataaaatggaataaaaagtagacatctgcacaggtgtgggatgactgagcagcagcagaagcaggaaaagtcagcgtccccagatcagctgatgtggtgttcggattctagataggggtgaggtgccaggatggggatgggggtcctgtggctctgctgccctgggggacacccctaggtttcacagtgcctgctgtggttgctgcactttgcttccccatgggaaagtgatcagagggtgtggggcttcaggtgaccccatgtgggaaatggccaagggaaggtggggtgggcggcacatggttttttttaaccaatatttgaaggtaggttgtatgaaaaggtgttaggcttatttcagcttatggggagtaggacagggattggtgagtgtgtatcaggtatattttggctcaggatggaaaagaactgtcacagtaacataaggtcttttgggaaattacatgtttactggcagagttcaggccagggctgggtgtctgaaaatacctgtcagggtcacttttatggttacaagggcagagcttggcttggaaccaggtttcttactaataccacatattaagtattataaaaactgtcctttgcaataggacattgctctatgatgcaggttgaggtccctctgtttaagtaattgtgggtggctgtgattctctcatctagtctgcgacttggacttcacctccatctgcagtccctctcctttgctgttgacactggtcagagttaagcgcatttactgacgatggtcacagggtggcagcactgcctctctggtattttctaaaacctcttcctggaactgagccagtctaagaggatgtcatgactaagaaaagggcactaatgaggtgaacagataattttttttttcttgtttctcctgtgaagtaacagagtggaggtgagcatggaataattgccttttagaaatggaagacaatggagagaagtgtttcgcaaaccttaatgtgttcacagatcccacacagatctttttattcaatacagattctgatttttctggtgaggcctgagattgtgcatgtctaaggagcttttggatgatgccattgctgctggttggcggaccacactttgagtagcaaggctcgaagatcatttagaggttaattctcactgcatctaatttatggatgaaaacaaaccaaggtccagagagagcatatacagcttgcctaacaaagccattccctaagtgcctgacttcttgcatttaaacccagggcttcagcctttgtccagttctcactccacacatcacacggtttgttcactgttgtgaacgacagttgtggcagcatctctttagtttaggaatccagagccccaatttcactaccctctttggtcttggctcatgctgtgacttcgaatagttttgcccttacttaaaatcttcagtggctcttttgtaatcacaagatcaagttcgaatatctctgtctagtgttcatggctttataacatatggtatctctttagtaaccttacctaacttccctgttttaaaattgtctcttgctgccatagccctccttgctccttcctgctccctaacaaactgtgttcacttctctctcagtggtagtgatgatggcatggcctctgatgttagactcatgtaacttctaatcccagatccaccaccaacattggcaagttgattcatctttctgaggataagcatcctcctctgaaataaacttagatggcggttgagaggggtaaataaaataacacacaaacccactctcatccctgagaccctcttcaaaactagcatataaaaatagctatttgaagaggttcagtgaaattcaaggtaacacagagaaggaattcagaatcctatcagataaatttaatagactgaaataatttttaaaaatcaggcagaaattctgtagctgaaaaattcaattgacaaaccgaagaatgcactaaatctttcaacagcagaattgatcaagcagaagaaagaatttgtgagcttgaagagataatatatgaaaactcagagtcagagagacaaaagaaaaaagaattaaaagaataatgcatgcctacaaggtttgattattaagctactcaaagagatacaagagaagggtgaaaaccaacataaagaaatgtaaaaaacaatcagaatataaatgaaaaattttctaaaatgctagctagtttttttttgagacaggctcttactctcatcacccatgctggagtgaagtggcacagtcatggctcactgcaggctcaacttcctgggctcagatgattctcccacattagccttccaagtagctaggactaaaggcgtgtgccaccaggccaggctaattttttgtatttttagtagagatggggttttgccatcttacccagggctggtcttgaactcctgggctcaagtgatccaggagattcactgccaaaaaggatataaccaagtcatatagtcataggttatctaaagtcaatgtgaaggcaagaattctaagagcagtgagacaaaagcatcaattaacttataaaggaaaacctatcagtctaacaccagatttctcatcagaaaccttacaaaccagaaggtattggggtcctaatcttttggcttcttaaacagaatagctctcagccaagaatcttgtgtagagtgaaattatatttcaaaatgaaagagagaaatacagtctttttcaggcaagcaaatgcttcaggatttgtcacggctagaccatcctacatggaatgttaaagggacttctaaatcacaaaacaaaagatttaaatagaacagaatagaacctcttgaaaccaaaaaattcaaatggcctataaaacaataacacaataagaaaacaaagtagataacgatcaacatgatgactggaacaaatattaacattgaatgtaaatgacctaacactccacttaaaagacacagattggcaagataaataaaaaatcacaaaccaaatatcagctgtcttcaagagactcacttaacatgtaaggattcttatagactcaaggtaaagagatgataaaagatattccatgcaaatggaaaccataagtgagaaggaatagctatccttatatcatataaaacagactttaagcaacaacagtaagaaaaagacaaataaggcaactatataatgataaaaggatcaatcaaacaagaagatattacaatcctaaatatatatgcacctaactttggagctcccacattcataaaacggttatgatgagacctaagaaaaaagatcaacacaaaacagtgagggtgtcctgggttttctttttattggacagcagtgtactagcctatcactttcccagtcaggggatttttggtctccccattcccctaccatgggttcatgccaaagtccatattttttattagtgtttggaattggattttttttttttgaggtggagtctcgctctgttgcctaggctggagtgtagtggcacgatctcggctcactaacctctgcctcctgggttcaagcaattcttctgcctcagcctcctgagtacctgggactacaggtgcatgccaccacacccagctaatttttgtatttttagtagaaacgagatttcaccatattgtccaggcttgtatagaactcctgacctcatgtgacagggaaacaggcactcagtgaacttcatgcgattgaggagttaatgataatgagagaagggctgtgaggggacagcactggggacaccagagcctgtgacgggctgagttgctgtgccttgggagatgcccttttgactgagccctgggaaggagggggtgtgggggcaggagctgcctgcagagggagtggcctcaggtgggcggccacctggctgcagggaagaggtgacagagttcgtgtgcagagcttggagggtgaggaggaggtgggttgaggtgaccttggtgagggtgaaccatggggggctgtgggccctgctgagggaggccagccagccctggacctacagggtggtttggtcttttttgtcccattcccagcatccactgagtggtgaaactctgcaggccagggaccatcccactggccagaaggagcgcacagtaggtgcccactcagtgcatgttgggctggacagaacctcactctgccccctgcccccagctttgggagctgcagcaaggtccctccccctagggatctccatgcctctgtctctgaggggtgagatggggagacttcaaagggccatctcagagtgtgggggatagagacgcagaagtgtgggggatagagggaggcctgggctctagacccaaaggaccttacacacctcctgagtcttttcaaatggtttcttctgttactttaaaaatgatgtaagtcatcatatttattgtaaatcccaggaatctaatcatgcgtaaaataaggtgtcttatccttgaccccaccccttccccaattaaatttccaggatgttaccactgtttgcagttggtgtgaatctctctttaataatactctgtttatctcacttgtcgttttacgccaaaatacccattgaattatattattgctgaagaccattcttttttttttttttttttttgagatggattcttgctctgttgcccaggctggagtgcaatggtgtgatctcggctcactgcaacctctgcctcctgggttcaagtgattctcctgcctcagcctcctgagtttctgggattacaggtgcacaccaccacacctggctaatttttgtatttttagtaaagacagggtttcaccatgttggtcaggctggtctcgaactcctgacctcatgatccaccctccttggcctcccaaaatgctgggattacaggcatgagccaccacacctgcccagaccattctgttctactgaatcatgtgtggtgggcacctcttatatcaatacatatggattttatcttgtgtttgttattggctcccctttttctcattgcatggctacactcaatgctttgtccacacccctgttcctgggttggaatcttgtgacagaaaatgaagtaacaaaggctaaagctttctaaagtggagtcaggagattgcaagacaattgcactttcaccagcaagagctcaaaccacagaatgttccaatagatttggataaacagctgaagtcagtattcaccagccttcaacatctcaactaggagaaccctaaaattaactaagcacatagaatggaatggacttgtgatttaggattccttctcagccaatgagctgcttctgaaaacaactttttgtggaaattacctgtaaagaaaaccctctcctgtgcttgtcttacagaacactagtcagggctgccctgattcagtggacccgaattgctattatttgtttcctaaacatatggtattttctgtgaccttcatctcaatcttttttttaagttactgggctgtttcccagttttcataatgacgagacattctgcagtgtttcatacacatgtcttttccccatgtggagtattgatccaggagctcattcagtcaacgcatgtttatgaagcatcctgtgccaggctgtgggctggtcactgtcttcagcagagagaggacaggcacagtcttgccttcacagagctcacagctcagggaggctcttagaagtgggatactggtcggagcatgtgcacattaaacatgatgaggtcaaggttgctatagggactaaaccacagtcccaccaagatcgcattgagttcctgtggtagaccagaggtcagggcccctaagatgtcctgagcagctccctctgctcagaagttttggttccacaggtgacacacctgagcacaggtgacccctgcagaacctgtgattaccacccaaagccaagagtgagtggtgggtgttctaggaggaaccgtcacctccatgggcagggttggggaagactgaggggagcaggtggctgatgactttggccagaaggtagggggatgggcaggtgtgcgctcatagggaagggaagagaagggagggcattgcaggcaacaacacaaaggttggaacctgccttcatggactgagaaaagcagggagtccacccaggctgcagctggggagggaagacatggggagcagtgggtctaggggagaagcagactgcgattgaccttggggactgggcagtgagcagaggtgtgttatgtgtgtctgtccccatcatagatatgaggaggggtgaggccgcgggtggcacctgggtcggtgggatttcatagtgcctgctgttccctagagcctctctgtatagagggtcagaatagatctgaggctgtggtctgggggaaggggctggtggtgcttaccatctctaggggtgggaggagagggatgaggatgcccctgagcagtgaagcctcaaggtgtgtggagccacagttgtctctcattagacatgtgttttgcgtgaggatgccagggcctggtggttattactgttgtcaagtttgcatgacaaggacccaggtatccagggatccagagcacagggcccctggtgaggggatgaggctcagatggggctgaccaggttcatgtggtcagagtgggagggactgatggagagacagagcctcaacccctcctgtcaggagctgtggctatgtccaggagagatgacaaggatgacccaggacattgagtgagtcattgagacattgaaggtgaggacagggcagagaggaccctggtgactgctgaaatgtaggatgtgaggagggctctgacccatgcaagttacaggacctccccacccccgagcccacagatgacccttaaattgggcatcctgagtgctgtgtgtgcccagcagggacactggataggctggacctgagtctctgtaagggcagcgctggtctgtaggaccagagtcttctctgtgggtgtgacgtgggcaggaattagcaagatgggggtgacaaggcttggcttggaggatctggtacagaagcccatgggcttggtcagctcagcttctcaggggctcagctggggctggaggagcaggatgctgtgctcagggcatgctccaggcagcgtgatgtgtgtggttccagggtcaggcacgggggtcaaaaattaaccatgaaaagttcccaccttctgtaggcagagaaaatggcctgattgtcagggtcagggagacttaccatgtggccaaagcaggctctcagcctcccagagaccacaccctgggtgcagcactcagctctgcagggtatggcaatagatgtgccaagaaccccaacatccagatgcatgcaaaaattttgcgatatataaaatagagcagatcaagtttccctgcaataacgttgttcctggttgtgtctttttcttgtaaactagacatggacatctttccagcagtctgttctcatctgccaccttcctgctgcagcacctcagaatgaacattcctgagacactgtccgtggtgctgacgaccaagagctatggaacagagtgtgatgtagaatcttctagttacctctgctctcctttcacttttaacaacagagcatcattaacaatgagaaggtggagaggtgttcaggatcttgaagtgacttctgtcttgctctcccataaccctgaagctgctgtagacattattgcagaaactgacaccacagtcaggatggccttgtccaggagcccatgtgcagtttgtagtgagcaaggatgagaaaatggtcttgaaaggggtgatggacagaacaggggcttttcaaaaatgtcacatcatcacccccagcatccgtgaatctgtcacatggtaagagaccttacagattaaatgaaggattatgagtttggaagattattgtagtttatccagatgggtccaacataatcacagaatcccttccttacaaatgagagagggaggtgggagagtcagagaaggaggaggagatgtggggatagatgcagaagacagagcggtgtcaagatgctgcactgctggctttgaagatggagaaagaggacacagccaaggatgcaggaggcctctaggaggtggaaaaggagaggaaacgcactctgccctggagcctccagaaagaacgcagccatgtgggcaccttggttcaagtttctgtgtcacttagcttgtgggaatttgtcacagcctcaacaggaacctacagaggagtcaccttgtgtgcaggtgggatccagggtcatttacagctaaatcctgatgtaaatattgcaggttgcttttcctacttcctatctcatggccaacaaccctggacaatggcagaacacccttggaaaccacggctctgtgctttagtggagggaccagcttgtttgtgggaaggtagcacctggtccaagtgaacctacatgagatcgttactctccccagggccctcagggaagggctgagaacagctggcccaggtgtgtggaggagctgcaggtgaggcagggctggaggggcctgtgggtccaggtagaggggcagacaggttgtcccatcgccatgggagcctgcacgagctttaggttggggaaccctgctcctctgacctggacgctcctgtgtggagaggaggcttgctcagtgagatccacgccagggggtaaattgggaactgatgggaaatgaggggctagagtcctgggtagtgcctgggaggaccttgctcaaggactgaattcttggtctgttcccaccttggttactctgacaacccctctctgtgtcccacggggataaagatctcctgagcagtggccattgggacagaggagaacctggtggccagagctaagcatccaggatcctggatttggggacaggcaagctcattgctgggggacagtgatagatacggcctccagggcctgggtgaagagagcaggagggctcaggacactggaggctgtgtggaggtcacacccacgatctgtaccacccatggatgctcctgcattgctcacctttgtgtggacatcagatggccccaacttttgcactcctgagacatctcatgcattcacagagggacccaggctggggctgtgcatggccttggtctctagggtagtgtgaggacagctgagcactcagctggctgggcaggactcctgcgaatcctgccctttcctgtgtagggtccaccccagcctgactcctaaccccctactcctgtctttccagggaagagagactggggttgagataaggtggagatatttttcctgtgtgacccaggagagaatggacatggagtttcaggtgagtttctgctaagttcccatgagcagaaaaagagccaatgagaggaagtttcccctttattcagatcctttccaggtgaccccgggtgggccataggcccattcactttccctgcaagcccccgcttcctgtggtgatgggaagccttcgccttggcccacccagagcccggggcagtctgttgaggtctctatatattcagcagggacccccatcccttcctgtccccaggcctgtgtctcctcaggactcagagctggttctctggctcaggctccatgtccttccccatccccagggctgggggcttcagggacgctccatcaacccacaggagcagctcccagaggaacctaagaagccacatctgctttgtggtcgatccagcagtaaatgtttgtgtcagagtgtagcaattccagtaaaaacagagaagaggtcttgacccctgaggccttctcagaacagggtctggcatctctctctgggcccacccagggctactctgggactgaacctggctgtgctcagggggttcctgctcccaggcccctccctcctctgctcaccacctcctgttattttcactgcagtttcctgaacttcagctcagccagatgccagtggggacagatcctgggtctccctggggcccaagggaccagaatatctgtggcccccactcacctcatagatgagagcagctgccctggtgctgggtaggggaatctgggcaggggagagaggggtgtcaggggacagggaaggattcctgctgtgtaggaattccagggctctcctcaggtgatggagggtcccagggtggggttagcacagggagtggatgatcctggccctgaacagaggcccagctcatggccagggcaggtctaaccttatccaagtcattctgggtagggtgggtttgtgctggggattgacagtccccctgccctgagcctgcacagctggggccccagtggaaatgggattgggaacggacagtcttacctaggagatggagctgtcagagggtccatggcctggggacagagacaaaagtgagcacgagagtgttaggatagctgggcccctcctgcaagagtgtgtgggggtcctcagttcttagagaattggggagagggagcctttctcaggttattttaggggtcaagtaagcaagtgaggttgaggaagtgacccatgacccagagcccggaggttagggctgacccggccagttggggtttcctgtgtgatgttttatgggatcctctttgcagccccagggatagggtcagaggcccctgggtgtaactggcaggagtggacaacttggggctggcttagtagttcccagccacacccagactgaagggacactcaccgggggtggaggctgggggctgctgctccctgaagtcactctgatcgctggccctaggaaaggtcagggttatttgtgaaggtgcaaggttaaaagtcacaaattggagttaaaataggggaccaggaaaggagcctatttccaagaggggtatggagacctcctttctttatggagttctgtggtaggaggggcccaggtgaggggagttgaggaaaggccttacaaagccacatctgtcctggccagaggggaaggactctcaggcagatgctgggccaggagaacattgatccagtgacacaggaaagggactgaggacccagggaaggaatcagaccaccaggggttgcctgagaggaagggtcaaggcaccagggggaaagcagggccaggcacatgtgcaggacactgaggggactgcatgcatcttggattctcctggaactcagtgtccctgctgtgaccagacactccactcagggctggagatgctgaaatgggacaatgatcttgtcttctgtctctgccctttggcaagagacataaacgacattccaggatatgccatattggggccccggttctcccttctcacagctcagtgtctgcagttaccatgtcagtcaaaggggtgctgaccccacccagcccgtccaggctgttccagtctccactatgtgataatgcccaggatcccccctcagatgccctctcactgggtggatggattcagtgaacagggggaggtaccaggtattgagcaccgctcccccctgctccaggcagctgtggctttgctgtgctaggaaactaggaccatgctcaggggcatggccttaattggactgaattcactgaggacaaagctgttgaggaagcagcccagggtcagcagctggtgaggaaggtgccatggaatgagagggaaggatccctggggagtcgggaggctggggagagcctggcactgaatacaagacagggtctccttccttctcgcctggggtcagcgtgaaggatgggagcagaatggggaaaagctgtggtacctgccagtttttcggaggagcaggaaacacacaagtgcagccaccagaagactcccaaccaggaccccgatcaggatgcctagagtgttgtcatctgctgaaagaagaaggcaaaggggatgaggtccaaatctgttccagggggaaccatgaggggccttgcagggcaggggcatggtcagggaggaaggaaatgccatggagcctgagtgtggtctgttgtgctgtcctcatagctggctcccttgctctccgtggttgcaccattttctgtgtcttaggcttgaattactgggatgcatcaactcctacattctcccacaggaagcctgcacctcatcctgctcctgtgttttttagtccctccttcctctcacatcactcctcttccccctgtttctttttttccatcccatggcagtcgtaaagggcaggcccttgctgccaactcaatgctgatgagcagggatgatgttcattgactgttttcaggggccttccacatggaaggcacagtgggaatcaatctacctgcagcttttctcaccctcccattgccttgagggagaagggtatgtgatattgtgaaatacgtatttggtgttcatcaccattgatatggttaggctctgtatccccacccaaatctcaccttgaattgtaataatccccatgtgttatgggagggaccttgtgggaggtaattgaatcatgagggtgggttttttccatcctgttcttgtgatagtgaataagtctcaggagatcagatggtttcataaagggaagcttccctacacatgtcctcttgcctgctgccatgtaagacatgcctttcaccttccatcatgattgtgagacctctccagccatgtggaattgtgaatcaattaaacctctttcttcatacattaccaagtctcaggtatgtcttcattagcagtgtgagaatggactaatacagtaaattggtaccagctagtggagtgctgctataaagatacctgaaaatgtggaagtgactttggaactgggtaacaggcagaggttggaacagtttggagggctcagaagaagacacaggaaaaaagtttgaaacttcctagagacttgttgaatggttttgattaaaacgctgatagtgatatggacaataaagtccaagctgaggtggtctcagacagagatgaggaacttcttgggaactggaacaaaggtgactcttgttatactctagaaaagagattggtggtattttgcccctgccctagagatctgcagaactttgaacttgagggaaatgatttagggcaactggtggaaaaaaaattctaagcagcaaagtgttcaagatgtgacttgggtactgttaaaaacactcagttttatgtatttacaaaggtatggtttggaattggaacttatgtttaaaagggaagcagagcataaaagtttggaaaatttgcagcctgatgatgcaatagaaaagaaaaatccattttctgaggagaaattcaagccagctgcagaaatgtgcataaacaatgaagagcaaaatgttaatccccaagacaatggcaaaaatgtctccagggcatgtcagagaccttcctggaagccccttccatcacaggactggaggcctaggaggaaaaaatgtttcctgggccaggcccagggctcccctgctgtgtgcggcctagagacttggtgccctgcatcccagccactccagccatggctaaagagggccaaggtacagctggggccatggcttcagagggtgcaagccccaaaccttggcagcttccatgtggtgttgagcctgcaggtgcacagaagtcaaggattgaggtttgggaaccttcgcctagatttcagaggatgtatgaaaatgcttggatgtccaggtgaaagtttgctgcagaagcagagccctcatggagaacctctgctagggaagtgttgaagggaaatgtggggttggaaccccgacacagagtccctactggggcactgcctaatggagctgtgagaagaagaccacaatcctccagaccccagaatggtagatccactaacagcttgcaccatgcacctagaaaagctgcagacactcaacgccagcctatgaaagcagccaggagtggggctgtaccctgcaaagccacaggggtggagcccaaggctatgggagttcagctcttgcatcagtgtgacctggatgtgagacatggatacaaaggagatcatttcagagcattaagatttggctgccctgctggattttgggcttgcatggggcctgtagcccctttgttttggccagtttctcccatttggaatgggtgtatttacccagtgcctgtacacccattatatctaggaagtaactaagcttgcttttgattttacaggcttataggtggaagggacttgccttgtctcagatgaaactttggacttggacttttgggttaatgctggaatgagttaagactttggggaactgttggaaggcatgattagttttgaaatgtgaggacatgagatttgggaggggtcgggtggaatgacatggtttggctcttcttcacccaaatatcaccttgaattttaataatccccacgtgttgggggaaggacccagtgggaggtaactgaatcatgggggtggattcttcccatgctgttctcatgatagtgaataagtctcacaagatctgatggttttagaaaggggagttcctctacacatgccctcttgcctgccgccatgtaagacatgccttttgccttctgccatgatttcaaggcctccccagctatgtggaactgtaagtcaattaaacctcatttttaaaaaaattacccagtctcaggtatgtctttatcagcagccaagaccagctcggtcgcggagatcctaacccagcagtgctagaggaattaaagacacacatagaaatatagaggtgtgaagtgggaaatcagggttctcacaggcttcagagctgagagccccaaacagagatttacccacatatttaataacagcaaaccagtcattagcattgtttctatagatattaaattaactaaaagtatcccttatgggaaaccaagggatgggccgaattaaaggaataggttgggctagttaactgcaacaggaacacgcccttaagatgcagattgctcatgctattgtttgtggcttaagaacgcctttaagcggttttccaccctgggtgggacaggtattccttgccctcattcctgtaaacccataaccttccagcttgggcattagggccattatgaacatgttacagtgctgcagagattttgtttatgaccagttttggggccagtttatggccagattttggggggcttgctcccaacagactaatacacccattttctggtatgtgactctaaagtccttagaatcttcaaagtgatgtctttttcaagctaataattgactgatgactggcagcccctaggcaacttcagaatgaggctggtcactgacccaggtaggattagagggttgggactttcagcctcacccctaatccctggggagggacctggagtttgaattaatcaccaatgaccaatgaatcaattaatggccaatgattgaatcaattaatggccaatgattaaatcaatcatatctatgtcatgaaccccaaaaggactgggtttgaagagctgaacccatggaagtttctggagtgtggtgcatctggggagggcatggaagctccacaccccttcccacatgccatgctctgtgcatctcttcatctgcatcctttgtaaagtcctttattacaaaccggtaagcctaagtatgtgtttccctgagtcctgagagctgtttgagcaaactaatccaacccaaacagggagtcatggaaacctcaatgtgaagccagtcataagaagctctggaggcccagacttgtgactggtgggaaggtggtggcaattttgtgggactgagccctctgctgatatgtccaggtagatagtgtcaggatggaattggaggacacctagctgatgtacggtgcagaactgattggctgctgggtgtgtgggagaaacccccccgcatcacatttggtcacagaagtgtgtctgtgttgatgattgttattgtggagtgagagcagaggaaaaacacagtttgagtttttccaaacagggtggaatcccatctgccaatttagaatctgaaacttatagtttcagtacttcaattaagattgaagtacttcaattcagtacttcaattaagattcagtacttcaattaagattcagtacttcaattaagattacagaactggtaagtgaaagtgatacaacaaaaatgtaaccaaagtctgctcaacttaacagctaataacaacaaagttcataaaaataataccagtcgatattgatagcactgattgagccctggctctgtgcatgaccttgttaagggctttaatcgcattaatctctgaataaatatcctcacaaccaccctgagatccaggtgtttgtaacaattctacagatgaggaaactgaggcccaggaggttgagtgtcttgcccaaggtcaaatacctggtacctattgtaaccaggatgataactggatgagtctaatccctgagttcttacccacattgctccccaggctctgaaggaatctcatccttctcattccgtgtatcattttacaccccccctccctcctaggaaaatatacaaggaaaggagtgagaggggccgagggtcactcacattttacagtcagcttgagggggtcgctcctgttggagctgactgggttggagacctcacactgatactccccagcgtcctcctgcctgatggggtctatggtgagcatatggttaaaccaggacagcttcatcctcttcgtgacctgcagacgctggttgttgaaaatccactggaaagaggttccagtgttatttgtgtggcaggtcaggaccacggagcccttctctgtgactgtggtgctgctggcttggatggagggctgagccactgactctgtggatagagtgaccaacagaaagtgtcttggggccatgctgcatcctcagagatctcagagtcaaatttagaacattctcctgtgaataaaggagaaagatgaaggacagggaggagcagagagaaccagagacacccatagcagcgagcagtagggactacagtgacctcagagaccccagggaccaggaggacccagctgcctcagaccaggaccagggagccctgaaaaccctcccacagatgagcggccccagagtcacatgagatgcaatacctggggtggctttaggagcaggcagtcagagaaatggaacatgggtctcagcccctaagggacaaggaagaggtgtggccagctcctcctaggatcctacatccaggacccagtctgtaaagaggttatgattattcctttcttttttcattaattccctccctccttcatcagagaactactgagtgtgtgtctcagttgggccttgtgcaggtacagggtgtagtgggaagagaaagctgagtcctttccttcatcctcccatgggagtgacatcaacaaatcaagaaattcatgatttcacgtccagtgagggaagaaatgtggatctgatgggagaggcttggacaatcctggcattgagtctgatagttgagacaggtgatttcgttctaagtaaaaactgactaattctccatttgcccgtcattcctcagaccagaatctccctctctgagctgaggatgcccaagaagaaaggagctgaaccaacatctggtcctggggtccacagatgccccacggtggtggccacgaccagattctgggctgcagacacacggtggtgtgacgttgagcactgacagcctgtgtgatgctgatgcaatttctctttaataaaatggggtaaatgtcaatggtccctggcttgccatcctctctgtaaattaacattaaaatatttacaattacctgacctaaagcttggcacagaatagctccaaataaacatcatctattattattttactccaaaaaaaaaaaaaaaagagttctctgggcctgattcctggtggagaaggagcggtccagagtgtcttttctctgctttccctcctcctgaggacagtgcacttcccgggacatcttttaagtttcccatccagtttaatggcctgggaagtttgtttgtctgtcctctccactctgactctcaggtgaaagatgaggctctgcccttgcccagatggggctctgggggctgagccctgcctggtgaccagctctaggaaccacggccctgggacagctggtaaatcgttgctcacaatcagccctgcccaggaagccacaacccagccctggcacaggctccccagggtcatctggagtcaggatcttgggacaggggcctggggcaggggcttgaagggctgagcttctctcagaggatcctcaggccaggccctgactgagtcctataagatctttctcaggtcatgtctatgaggaggaggccaagcggggttggactgagactgattttcccccgctgcatctcccgcatcagactatccttcttgctgtagggaatttccacggagtccggataagggaaaggaattctgatctgttatagtttgtctcccctgggtgtgtcctgcactaaatgcccaaaccccaacatgggacgtaatgcagagggggatgcaggcacagcccaggcctgacaatcctgcgtatgtgaagcagaactgacccccaacacccagaggcacggaggaatcactcaccgtatacacggagatggtgagatgcctgttcaatctgagaatttctgtatgtgacttgtagggtgtagtatcccgtgtcctctagggtgacgttctggaaatgcagatctccactgggtgatattgtctctcgaccgctgtatgcaggccctggagtcctaacgtgagtgtctattacatatgctgcgattagctggttgggctccaccgttttccctttgtaccagccatagctgtaaagattctcgggcagataaaccacagagagatgaacattctccccttcagcaacttcaaagggcgctgatgcaataaagagccaggcagtggtgggtgcgttccagaaagttaaaagtgaggctaggaaagggagagaatatcagtcaatatttgacctatgcattggcatggaaagacggggtcctgggtgcaggtctcttcacccctcagccttagagggtgtgtgtgtgtgtgtgtgtcctactgggtcaaagtcagcagcatgaccctcattccttcagtacctctgaccttggcatttccttgtgtgaaccctctttcccaggggtctgcatggttccctccccactgccttcagttcctactcacacaagggaatccctgggagacttctttcgtgaagcctcctctagagaccctgggtcttccctttctgacctttcccagctctgttccctccagggctcttgtcagcacctgacctcacattctagatctctttgggtgtctgtcttcccccccatgagattgtgagctctgtgagggcatggacttgagtgatgttagttgcaccccagtgcctgggacaggctgcagactcctgtggatgagttcatgagcgttcccagggccttccatatcctggggtttatttgctaatgtctgaggttggcagatgaagacagagtttcatgccctggtggtgtttttatttaaattgtcactgtgatatagttttactatcattttcaaaatgtagtggccactgacaatgaacttgaaaacatggaccaactgagattgttttgccccttggcaattccagttcacttagattttttggttctccttagacgctctctcccctgagtctctaacaaaagccctctgtctcctctcagagccccatcctccccaggagaccccagccagtctctgtgctccctcctcccacccactcccagggagtcctcccctcacctgtgagcaagagcccctgccaggggatgcattctctgtggggacaagctgaggggggccccatggtctctgctgcctgctctgtcctcctctgtggagaggagcttgggctccaggaacgctctagacagggttactgtgactgttgtctctgctgtccttccttcctctatgctgagcttcctctcaggcaggagcacttcccgtttatgggcaagggcggggctctgcctacaatgtctctctgtcccctcccctctcagtcctgcctcccttgtccctcctttctccttcctttttgcctatatttggttccctaggcaaaactttgagaagcaacgctgatggggtcctcataacaggacgacccactctccccagtactgacctctgctgtgttctggccttggttctgtcacagccggtagattatttccctttgtgacacacaaaaccagctgggccctgggtctcctcatgctctccagtgctccaggaaggcagaatgatgcccagcaggaaagtgacagaggtggctctgggggctagaaaggggctcactgggtgatggctgggaaggacccacccgctatcttcagtgtcaccagcctggcctctgacccagggacagagacccaggcctggaggtctcgggaggatccccagctcctaggtgtggagggaggtgtcctgtgtgtcctgggaagagaggactttgatggaaggaggtgggaggctctgggttctgctgtccttggtgaaggtttcagggggaccctctccatgtctggggtctgtgcccccagcttaactctcattctctttgcaaatacatatattttgtggatctgcagttgcctgaactgtctcatgtccctaaatctttgtatccctttttacagaaggtcaggaagggtgtgtacatgagtatgaggactatctgatcagggcgagtgtttgtttcccaaagatctctttagatatggtataatacataagataaatgtactgaattagcaattttaagtgtagaattaaatgatactaattctattcacaatgttgtacaaccatcaccataattttttaccagaaaatcttcattataccaaatggaaacttcatacttttaatcaataactccccacttccccctgccccacccactggtagcctctgatactatcaatctctgtgaatttgcctagtttacatgtctcatataataaggaattatatacgtgtattatttttttctggattatttctcttagggtaacacttttaagattcatccacgtcgtagcatatattacagcttctttcctatttatggctgagtaatatcccaatatatgtttatacctcaattttaattcattcatctcttaatggacatgtgggtggtttccacatttttgctattgtgaaaaccgctgcaatgaacttacacttggaagtatctgtttgggtttctgtgttcatttctttgggggtacatataggagtataaatatggggtcatgtggtagttctatgtttaagtttttgagaaacagccaaactgttttccagtttgctgtgctattttatattcccatcagcaatatacgagggttccattttctctacattcttgtaaacacttactatttaatattttttaaaacttatagccattctagtaggtgtgaagtgatagctcattgcagttttgattttcatttccctggtggctgatgaagttgagcattttttcatgtatttactgacaattttaatattttttagagaactatttattcaaatcatttgctgtttaaaaaaaatgggttatctttttattattcagttgtaatagttctttatatattttagatacaagtcccttatggggtacatgatttgcaaaatttttctcatattctgtgtcttctcactttcttcatggtgttctttgaagcacaaacatttttaactttgatgaagttcacttatctatttttaattttgttacttatgctcttgatgtcatattgaagaaaccattgcccaatccaagatcattaagttttactcctatatgttcttctaatggtttgataagttttgctattccatttaggtttttgaaacattttgagttaacttttgtatgggctgtgaggtaggggtctaactacactatctcgcatgtggttatccagttgttccagcacaatatgaagaggctaccattctttccccattgaggaatcttggcacccatgtcaaaaaccaatgggctgtaatggtgagggtttatttctggactcttgattctattccattgatctctatgtgcattcttgtgccagaagcacactgttttaatgattgtagtgttttagtaagttttcaaattaggaagtgagtcctccaatttttttttccagattgttttggccattctggggtgacttttaaaaaagatgtagttcaatggttctcaaagcaggagtggttcagctctccttttttggcagtctggagacctttttaggaccttaatctaagtagataaattattcccactttcttttctgagttgctatgttacagtgtatattgacacccatgaaataattgagagaccctggaagtgcttgcctacatagtgagggacaattagttccatgatcatgggcacagaagattttgttttgggaaacaattttgttggtggagttatattcatgcttactcttttatttgtcttcatagcctgcatctccttcagacttcatatctgtttattttcttgtttgtcctctggggtttgggtgttgggtgaccagtcagctggagctggaggaggtgcttagcaaggcagtgaccctggttgggaggagcagggctcagcagggtgaaagtagctgggccttgagtcaggagtggcatctggaaggcctgactgtaagggtcagaagggccagcaggtgggtgtcctaggcacaaacggtggctgctgctgtggactggaggaaggtaagaggccccgagtattccatgttcttactggctccccaactgaggattcctctcctgggctggtgctgtcctgcagcagggaggggttagacagggacggctgcacatcaggccggagtccatgtcatcctcttaggcactgtcactacagattgaggattctgttcataagccaagcctttgcacaaggaagggacccgggctctcaaggaagagcagctcctggtcagacctccatctccttctctctcattgcctgaggcctcaagcttggtctacctggcacaggggtctggatcctcctcccagggttggggtcttactgagctgggcacctgcaggtgggagaagatctggaggggccccatctgccttcaccagattgatgttgagggtccctgagtcctgcaccactatcaggtgctgagcaacttccagtgtcagtgacaaccaccccatggtggaagcagaaccacctcgtgagaaagcacctccaagcctcagtgcttgccatgtgtgggaatttgctggtttcagttgggggcatgttggtgggtggtcatgaattcagggccggattctatgctcacagtgcacatgctggatgtggtacagaccccaggcagggctcagtggggtggttttgggtgtgcacaggtatcttttctggaggagctggtggtgatttggctcccagaagttcctgagctctgcagactcaccaagcactcaatatttgagtgaacattgggcgagagagcagaaggtaagtgtcagggcatcggggttggtgcctctgggaagaggaggaacattctgggaacaaagctctcccccggcttacagggagcttcccatcgctcctgccttgaggatcagggaaactagggcctctgctcttccaggggctgcttgcaggcagtttgctctgggagggggtgacccaggagttgcctctcattttgcatttgagatttaaaaggagaagggacagtatatcttgccaggtcacaaaaattacaggcatcatattgactgaagggcactcctgtcatcactgcaatataccagaatggtcttttaaaaaaataagtgatttaggtttaccagcaactgtaatgcttgttttattcttctagttcaccgttaatgtcacttttgtagttttagcactggcaatgttgattttatgttgactctgatgattttaagctttcatttgttcacatagagatcatcttctttctgaatattaatgcattttttctctatttctactggttattcctgtacatagagtagagaatcacttttcccaaggaggtggaaagcttctgactaccaaaaaaaaaaaaaagtgtcaaaatgctttaaagtcagtaacttaaagatcaaatccaagagtgggcaacagattctgcccagggtctgaaaggtggagaggtgactggtgaggatgtttaaaagacctctcctctctactccctaaatgggggccatccagtgttcttgaggttcagagaaggcccagggctggggcagcagggcactgtcagctcccagctcccaggggccaggagtaagaccccaacactgtccagacactgattgcattcattttgggggagagtagattcttatttaaagaataatacaaaagtctacaaatatgaacataaacagaaattcctttgctacaattttccccttaataagacattccttcctaatgacatatgtgactgcattcatggctgagatgttttctaggatggtgagagcatcagagtggactatctggtgccttggggtcatgcattttcttcttccaatgtctacaggatcccccatgtcccactttgtagtgtaactcagtgtgtgtcattctggtttttgttgtatagatccttggaaagcccatgtcattcctgctgtgaggtacaggcagccaaatggcatcatctctaaacatgccttctcctggtacatcaaattatggaataaatgaaagccattttgacagatattgaagatataagtttctactcttcccacacatgcttctcccaagtgaaggattttactggtgaattgttattagagattagtgtggatcagtgactctgccaggggaaattttgccctctaggggacatttggcaaagtctggaaacattgttggttgtcagagctgggggagggagtcctgctggcattgagtgggtggatggtgctgaacaccctgcagttcacagagccccaccagtttgaccacccaaatgtcaatgctgaggagtggagagccctgctgtgccctcccgcagcttccctgaagcttcccctcacctgctcctcccatgtctccccaccacttccccacttcacccgcctccttacacctcagtcccctccacctgaactcaccccttagtccaaggccagccctgatctccgctctcctggtctccttgctccttagcaggaggcgcccactagatggcgcccttgcccttactggagctcaccgtctccctttccaccctgagacaaatgtggctgcttttactgccacaaccccagccctccacactctagatttgctcagggagcagctcctggacagacctcagggaccccagggaggagcctcactctggagattttgatggcatggtctttgaacttcactgttacccccagtcaggatccaggatgttgggagtgcatgattctgcccggtcccacttcagcaggaccccactgctgagttgtctgtggggacccgggcctctcatctccttcttgcattgcaggagagggatcttagcactgctttcacataaagtcagataatggaggagtgcaggtgagtttgggaaggtggacatgaagagaggttgtgtccctagaggtggcagcagtgagaggatgggcaggtgggaggaacacagcccatccagggttgccagccatattaggagcgacagcctttcctctaagcctccagcctttttcctgaaacattccagaactttccacttcagcacttcccactgaggctcctcaggtctgtccctgagctcccagctgagcctacctacccatctgaaatcctgagtcctgtgtcaccctcgttccccattattctgtgcagttctgtgggacgcccagctctcctgacacccccagtcttcagaatggccatcagcgctgtcgctgtggcaccagggtgactgccgcctggaggctgagtcctggcttcctgacagctgtggggcccgctctaggctcccttgtcctgatcattcatcacctccaggatgcacagcagctgggccagggggaggagcagggacaggtgtcagccaccctgtgtgtctgcaagtcaggctgggggtgtgggaggacgccaggaatgactgaactttctgatttagagggtgagagcttgcactgatggaatttgggatttaataggaaaagcatagcgttttcctattttgtaggcagggtggctggagtttggaatcatagattcccctgggatgtcactgtggacctcagtcccacccgttaggggcacagatttcagaatccacaccctggggcaaagcaggcatgggaggctccatcagcctggccagggctctctatttgtgcagctgctgcaaggagatgtgcactctgatgggaacagtgctccctcctccttggggggcagtatctagctccctgcagcccctctccctgcaggccctgccctctctgaacctcaccttccccaacccgccccccgcaatcccatctcagctgtaatcccaacactttctcatccattatgggtggactgcttgagcccaggggttcaagactatgctggctggacaatatagcgagttgttgtctctacaaaaagacaaaaattagctgtgcatggtggcatacacctgtagtcccagtcactcaggaggctgaggtgggaggattgcttgagctggggaggctgagttggcagtgagttgagattgtgccactgtatacttcagtgtaggtaacagagcgagaccctgtctcaaaaaataaaagtaaaaaaaaaaaaagaaatatggaatacattattgttaactctaatcaaccatgctatgcaatagtccaccagtaataccagtaatagccaataatgaattatctgaaaaagaatacaatttattcttagctatctactgctaaaatttttaagctatcttttatgatagctgaaacaaaagaagtaaatttaaccaaggaagtaaaagacctttataatgaaaactgtaaaacattgatgaaataaattgaaaaagacacacgcacaaatagaagatattccatgttcatgaattggaagaactgatattgctaaaatgtccttaccacccaaagtggtctacagattcaatgcaatttctgtcaaaacaccaatgatattcttcgaagaagtagaagatcctaaaattagaaaccacaaaaattcctaaaacctgcacaaaacaccctgagttgccaaagcaatcttaaacaaatagaacaaagctagtggcattacacttcctgacaatcaaagcatactgcaaagctatagtaaccaaatcagcatggtcctggcataaaaacaagcacatagatcaatgaaacagaataaaaatcccagaaataaacccatgcatctctagctaactgattttcagccaaggagccacatgcacacaatggggaaaggacagcctcttcaataagtggtgctggggaattggatattcatatgcagaagaatgaacctagaccctatccctcaccatgcacaaaaaattaactcaaaatgtattaaataaagacttaaatgtaagaactgaaactatgaaactactagaagaaaatatagggggaaaatccatgacattggtctaggcaaagagtttttggataaaatctcaacagcataagcaacaaaaccaaatataaacaaacgggatttcatcaaactaaaaagcttttatacagcaaagaaaaaaaaggccagcagagcaaagagacaacctacaaatgggaggagaatatatttgtaaatatatacatatatatttgtaaatatatacatctgataagaagataatatccaaaatatataagaaaattatgtttctgtatagttttatctgactgggatacagaggccacatccacagtcccatcctcaaaggccacttgttcccaaaatgtcaagcacatccctcaatgatccatcatcaacacctatgtctgtaggatgaagggtgaatcatgaagcactaaaaaggaagaaggaagccaatcccaaaacaaaatgatgcagggtctggaaagtccaaagcattttttttttttttttactgcatcttcctcctttcttctccacattcccaatcctcactattgattaacaaaacaaaaaaaactgggacccaccatcttccctactgtcaggagatctagcgagattgtttgagtcttagaccaaactttgccataagccaaatttctggctgactttacaatgatatgagctagcacagtctctttttctgccagtcaacttgtgctcggttttatttgcaaccaaatagaggtggtaaccaaatataggtgaccctaaaattagtcatcaggatgaaatcctaaaatgtgcaacaaactgggttgaattcaggattagtagcaacatctctgttgtgggcttgaaaagggggcacccttttatgcagtagcaaaattgctaaattgttgtttgctgagtctttggactctcatcccggattttctatgaccattcaaacagggctgcaatgaacatctatggttgtttagcttggcacacttctacatttctatatagtaatatctagaagtgcatttgctcaatcacaagatatgcacattttataattgactgctatcgaactaccttaaatagccttaatttgttctcaacattgtttaacagggtctgtttaatgtcctacgtccagcaaggacagtatcacttttcttaatatttttcaaattattggaccttaacaaatacttaatgtgcaattaattgattcctttgtattcccatgccttcttttatatgtttccttatagtacacaaaaccacattattgtttctttacttgtgtcattccaccctggaccattcctatctaaactataacattatgagagagagagagagagaaaacaatatgaaaatataaattgattaatcaaaaaaatttaaataggacaaatcaggaagacacaagagagattttaaaattattcagagaataccacaatagctgtaccaatatattttaaaacttagatgaaacggacaactatctcgataaatgtaaattaccaaaactgactcatgaaaaaatggatattatgaatagagcaataatcagtaaagcaattaaaaagacagttgataatttttatttactgacaacaataacaaaatttcaggtcctgatatttttatggtgaattttaacaaattttcaagctcctcctcaaccaattctcagaaggtttaaaactttaacaagaaaacactttctaacacattttcagaagctgttatagcatgataccaaaaccacacaagaaaattatagaccaatctcacttacaaatatacatgcaaaatcaaacaaaatcttagtgaaccaaattcagaattaataatagcaaacaagcaaaatatgttatcatacgtatggcttatatcaggaatgcaagtatgtttcaacatcagaaaatacttctccacattaacagactaaaggagaaaaacgcttgtttaattatctcaataggtttttagagaattttgaaaattttataaagttatgcgtattctgtaaaattgatgaaatccaaccttgatttatttttaaaaattgcctttcctatagaattataggtaaaggaaacacatgcatcctcacagagctacttcaaggctaagttacttcccataagtaacgtatcctgtaatgtgtgcttggcacatattcaatactaaacaaatatttgcaaatcctcaaaccacttctcgctcaaataacccacctttgtcttttgcctttatgttagggttgattttctcaattgtatcttggagatcctttggtgggtctttcagcaattaccctgaatttgcttttctgtttacaattttaattcctgggaactctttcttgttctctgactgcacccttttcatgagagttcagccatcaatcctccagaaccccaccccccccgcccccccaaaaagcaataaagatgtctaaaagcttccttctgggctttcgaatgatgtttaccccaggcatttgttctattcgttcatcacccattttccctacaacttgcctacacttgatatcagatttttatttattagtcacctatcttcttcattggcccattttcctattttgccactggttgttctcaaatgtgttatgattcctggttgtacagtcaagtggttgataatcttggatatacgataaagatttgctctgtagctgtgtgtaagcctatataaaagcttttgtatttttcttcttaaaaaagacaaaagatggttgggaagatccctccagttcaccagttcgaggctgcagtgagctatgatagcgccgctgctctagcctgtctgtctgtgaaaaacaaggggggcggggggcgggggggaagactggagatgtaaatctcccgcagggccctacccgtatccgcaacaggtctctaacaggaacagcctcaggcctgtgttggaacaaggtaggttacagaaatctggaagccagatctgtaacttcagggtaaggactggctctcagggctgatcccccgggctgggtgtcccagaggcacccgcccccgccccttccccaaggcaggccaggacaccttcactcctctccttaggctccccacccccttctcctccccactgtgcctcctggagtagcggtggcggtgccacaggggagcggggcggggcgggctctgagggcaagggggatgggccccgccggggtcactggcggccaccctggaaactcgacgcaggccggcccttctagtgaatcgtcccagccacagctggcctcccagccgcgcttggggcgcctcggggcgcgaatggtgcaggttggggagactcaccacgcaccgtcgggggtcggtccggttattcctcaccgctcggctccagtgggcgcgcgggcctctcctcctcagttcctgcgctgcagtccctccctcacccttcgcagcttgggaatccaactgtgtcattccgacggagcgccgtgaggacctccgagggtgttagcgccaagtgatctctgtccagcgctctgaatatccaagtaaaggagttcaatgaagggcgggtcaacggaggagaaaccgtgactctctcaagggagcccaaggcctccttgtctaattagtgacgcgccaatggatggaggctcttcccaccatctcttcccagcatccagtgacaccaccgccaagggacgggctcggcggaacctgcaggaaagaagcatcggctgagcctgactgcagcgctgtgaagagacaggggaggggatcagtagttggtcccgcgcccaccccctgtttccgcgaggggcggagttgactggccatgcaggcagagggcgaaatgtgaaattccactactcctaccgtttttccctgacccgatggggcggagtgtcgtcaggctaagttccctggcggtaaggtggggagattgaggcgcacacctgccgaacggtaacgcaggattagctaaggcgagctcaggacagaagcctcccgaggagcaggagggcaaaataataaataaataaataaataataaataactcactccttggtctttatttgcggcaggaattcagaaggtgaaagcggggccttaggatctttctgaccttttgggttttaagcaggaggtgtcagaaatgttaccacagggctagctggcttgtggccagcaagcgttcacaatgccctcgatttttcatccctctctgtgggttctttttttcattgtaaggcagaatttctacgattgctcacccactcagagaacctgagctggtttagaccaggtgagacaggctaggtttaccctggtgatgatgtgttgttgccatggcgatcctgcccagtaccagaggccctgcagattcagatgcttggtgcctgtgcttggctgaggggccaatgggtgaagctgccatctgcgggatgatgactgaagcctctaagtcagaatccgcccaggctgagccttagggcagctccatggagcctcggctggcctgggatagagagtccaccactgtgccagcccccagccactgcctaggtcctgtgctgagagccccttgtccagggaaatggcgtccagtggaaaagggaccacccccttgcccttcactcaaggcaggttggtgacaaccctgaagctaatccgttcctagaggagctgcttctgggtccgagttttctctgcagcagagcagctccctggatgggatctgttcaaagtccgcctttcacgcggaattttccgtccttgcaattttccacctccaccactaggggatcctctctgaccgcctcatgccggctctggcctctgagcaggggtttctcttctgcatgtgcgaccttgcgcatgcctagtggccttttgggacctagagctgctccacaccccgatggggttacagagtgcctcgcctccactccaccccaccagggttccttccctggctgggatgggatttcagaagcgccgaggaacagcccagacaggtgtgggagagtagccaaggcccctgtcccggggtggccaggacagcggtggcctcgcataggacctggctgggctgctgcaatcagtgtcctgccccttggagagcaacagtgaaaacaacaagactatcttcacccaccttaagaaagaacagaaccagtatccccaactctgctgtgtatcccaacccaattccattccccaccccactctcagtagccaatatgcaaaatattagaatactcttactgttattattttcaaccacactctgcatcctgaaaaaccatatatttcgttatgtgcttttaaacttcttgaaaatgaaatactgaggctgggcgcagtggctgacacctgtaatcccagcacttcgggaggcggaggcaggcggatcacgaggtcaggagatcgagaccatcctggctaacacagtgaaaccccatctctactaaaaatacaaaaaattagccgggcgtggtggcgggcgcctgtagtcccagctacttgggaggctgaggcaggagaacggcgtgaacccgggaggtggagcttgcactgagccgagatcgcgccactgcactccagcctgggcgacagcgccagactctgtctccaaaaaaaaaaagaaaaaagaaatactgaattttcaaatacttgctttttttttcggtcaaaattatgttctcaaatttcactcctgtagatgtgcgtggctggctgtagtttttgcatttttattattaggtattctcctgttgcattaatatgccacattttatttctctcatgtttttggtgaccacttggggtgttttttggttttgtatttttgctgtatacatgctgccatggtggacatacctctttatacatatttcctgttgtatgcagacacaattttaggatgtgacatcttcagcttttctattgtgtcgtgtgtcttttccttcgtgctttgtgttatttacatattctggacacagattctttgtcaactgtatgtgctgcacatctctttcccagtttgtgtcttcttcttcttttttttttcttaaaaaaaactttctttatagtgttttttttttctttctttctttgttttgttttgtttttttgagatggagtcttgctctgtcacctaggctgaagtgcactggccgatctcggctcactgcaacctccgtctcctgggttcaagtgattctcctgcctcagcttcccaagtagctgggattacaggtgcctgtcaccacacccagctaatttttgtatttttagtacagatggggtttcaccatgtttgtcaggctggtctcgaactcctgacctcaggtgatccaccctctttggcctcccaaagtgttgggattacaggcgtgagccacagcacctggcctgtgttctttcttaagtagatgttacttttaatataatagaatgtatcatattttgcttttatattagtactttttctatctaattcaaacacatccccaagggtctttgtgtgtagactgaccaatttctcaagaatcatgaatgaatactgcttctctttccccaatttatctgtaatgctacctttattataaagtttctatgcatgtgtagaaatagttcctgatttttcactctgtgccaccagcataccaatagcacgctgtcttaaatattaaatagcagagctttatgagacaacttgatgtgcagtaggcaattgcccccttgttactcttcttcagggttctttgttgtaccacatgaattttagaattggcttgtccagctaaaagacaactgcaaggattttatttggaagttcataattctatacataatttggggaaagtattttcataataccaagtcttcctattaatgaacacagactctctctctctctcccccacccccacctgtttagttatttatatctttatggtctgttagttattgtttattgtctttcaaccaggtttcatgtttttctacatagaggccttgcatgtgaaagtctttcttcctagcttgctattacaaattttttttaattgcactttttgggtacagtggcttgtactgtaatccccgatacctgggaggctgaggcagatggattgcttgagtccagaagttcaagaccagcctgggcaacataatgaggtccctgtctcaaaaagtttgttttaaaaattgcatttgctgttattcaacaaatgtcattgtgtctcatatatggatttttatatctgataaccttgttcaacaatcttttgattctaacaatatatcagattcttttgagttttccatatagacaataatgtcatctgtaaattataattgtttcttctttgttatttcttggaccttttattttatatttttgtcttgctgcaaggcaatatccctctatatattgtggggtcttttttctcataaagtggggatggtgaacacccttgtcttgctctctgattgtataaagcatgctttctgtagcattttgtagacgctcttttttagattgaggtaattcacttttatttctggtttactgagtttttagcataaattcaggctgaatttgagctaaagctttttctggagacatcatttgaaaaattcatatgatttactttctttaagtcaccaaagttatgatttacattgaactgagtttctactgtttaactgtattcttgggagaaaacccacttgtcactgaacaatatctgttttatttactgctgtcttgtgtctaaattttcttttaggattttttgtatatgctcagattagcctgttattctcctttctgtatttttttctggtttgggggtcaaagttataatagcctcacaataagagctaagaaaccagccctaatggaggccggggcaggaggtttggagttcaagaccagtctgggcaaaatagtgagacccccatctctatgaaaaatagaaattagccaggcatggcagtgagtacctgtagtcctaggtacttgggagggtgaggcaggaggattgcttgagcctaggaatttgaggctgcagcgaactatgattgtgccactgtactccagcctggatgacagagcgagaccctgtctcaaaagaaaaaaaaagaagaaataaaaaggaaaagataaaagagctaagcatctgtttccttttttccattttctgggagagtatgtgtaagactgtaattaactgtttcttgaataatgggagaactctgtaaaataatctggctttggtgttacctgtattggaaggatgaaaaataccaattcagtttcattattggttgatagggctactcatgctttttgttttgttttgttttgttttgtttttgagaggaagtctctctgtattgccctgttgtccaggctgagatgcaacgttgttcacaggcctgatcctggctcactacagcttctaacttccgatctcaatagatcctcccgcctcagccttcccagtagctaggactacaagcatgcagcatcacatccagcctcttttcctgcctgacccagttctggtttcctttagttttctaggtgttcatccattttatctaatgtttaatgcatttggcataagggtgctcagtgtcctttcattgtctgttgtctgtaactgttgccattttcattcctatttatgagtactggcgtcttctctcactttttcttaataatcctgctggaactttgctttttaaagaacatcttttgacttgttgattcttttttcatacatattaactattttcttattttttgcctttatatttatttcttttcctgtttgaaacattgctcttttcttactataaaaatgggtaagtagctcatgaattaccacctcttttaaaaatcttttctactgtaagcattttagcagtttacatttgcccacaagtaccacttcagctacaccctatgtgcttttacataaagtcttcatttttggtaagacatattctcaaattttaattatcacttgtttttaaatccatgatgttttatttgaaatgttgtttctaaagatacattttctggttatacttttattcttctaatttagcacagtggccacaaaacatggtctgtgcagtgcatacaatcgatgagtaatttctgagctgtagtatttggcataatatatggcaaaatttcctaagttttccatgtgtgctttaaaaaacttccagtaaaatacataaatctgttagatcaagcttctcacattgttcaaatagtctatatgtttactgattcatttgactgcttgatttatcaattacaggtaggaatgtattcaaatctcctattaaagtgtgacactcaagtggctttttaaagacagagatgccaaaccaatgaatacatgattttccccaaagcctgcacaaattctctaatgaaattttaccatgaaagtttgtttaattaaggcttactaaagcagtatgttgtcttttactttttaaacagagaatatatattttaatacatcgtttaagtttatgattaattatctattactgaggataagaatctttgcctgtgctcattcagcatttgcacttcatttatgatctgccttctcatagcttctgttaatttttatactagagacatttatttgtttgtataaatgttgaaggtttttttttgttgttgttgtttttgagtcagagcctcgctctgtcacccaggctggagtgcagtggcatgatctcggctcactgcagcctccatctcctgggttaaagtgattctcctgcctcagcctccagagtagctgggactacaggcatgtgccaccaagcaaggctaatattttgtatttttagtagagatggggtttcgtcctgttagccagggtggtctcgatctcctgacctcatgatctacctgcctcggcctcccaaagtgctaggattacaggtgtgagccaccgtgcccagctgggttttttatattataaggagatgtaatagatagatagatgtttcaaagatagtcaaatgtttttaaaatttaaaacacttttttacaggttgactttcaccatttaatttcatctatgtgttttgccttagagaaattttaaatgctatgtagatctcatgacttataattatgaagcattttgttttctgttttccacgaaacttagcttaactttgagcatataatagttgtaaaggtaggagagtaacactgaaaaaaggaattgcataaaaatggcacattttctgtagagttgtttatcgcctgaaaataggccccatttcatggaagtaagatgatcaggctcaggtccccagacgaaactcttggcatggtttttggagatagtccagggctcagtactggctctatcatttgctacttctcccaaagtaaccaatatctcatccaccctgagcccatttccatatctctaacatgaggataatagcatctaccttacacaccaagtagagggatcaaatgtaggaactaaatcaaagtaccagcactgaataacctacatcctcccacttcccaaaaggaagagagatgtatcccctgttgacaaacgagaccattttgcaggagagaaaggaaatgccagttcacttgcaatgtaaacatgctctctctttttagggatgtccagggacctgagagagaacccatgcttaccaaagagtttctagttccagacacacaggactcgaagggtgacaagtatggttttcagggtccctgaatccacccagtcctcacagaaactcctaaaagctgtcgattgacagcgttgagttcacagctctggtcctcacatgctgatactgcttgtgatatcgaacccgacaggaccccacatcacaattgatttaccaactacaatataatacctcctgaatctccaaattggctcacccaggaacaaaggcttggggtaaaactggattaggagatataagctctgaattttctgagggtgagacacacaaggattctaagtgacacgccacagagtaacgggtctgtgactggaggacccacagatttgtcttactggagacaccacatgcacacaaactccatccttagctgtggaaacaagggtcttttgctatcttagccgaattctgggagtaatttttggaggggaggagatctttgggattgcctctttcaggccctttacaaaaatacctacttcttaaatggtaaagcttacactaaactgaaaaaattacatccttggctttttatgaagtaggtgttggattgaatcactactggaagaagtatggcatcgcaaattctaagcagtggtcaaaggatggatctgttaaattagaaaaatctctaaatttataaaaagattttagattcctttattctaaacaattgacctatttgtactcatgggacaatcaaatttcaaaggagatatgtaacgatttcatggcttgcattaaaaatccttctgataaaattaaagataaaaaatctgaccccctgccaaaaaaatcttttgaagttcatactgcctgctttcaatattctgtgggattcacaatgaaaggtgccttatattgtggcctagcttcaagtttatgccttcgccaccatggcctgggttcaattcccagtcagggccccagcgcctttggtttaatgtttgcgtggcatttgacttttttacctatttagtattggtgagattacctttggtaaaaaaaagtttaaagagtggaaatcgcaattctttgtgttggctaaaatctgattataagagatctggaaggttttatttttctttttcaaagagctctatggtcagaagtcggcttcatgaaaagctaatatttaattatatgtacatacagtctttctggattttctcttttgcctcctgttttgaaaaatatttggatttgagtgaaactccgttttagaaattaattgcttggtacaatatacccatgtaactaccctgcacatgtaccccctgaatctataataagagttgaaattttgacaaaataaaattagattttgaattaaaacaaataggtgcttggttcctctgctcacttctttttaaaaggaattcctctcccatgtacttcttcttttcccttctttaccttccttttggcatctttggtatcacatgaagggatctagagggaattttaagtgactctgaaattccttgagaaatacacaaaaagatcccactcaccccttttgggggtctcctgttctccttgtggagtccagagtcagggacaggctcctccaggtctgcagctctgctctcttttatttcatcttggctgattgctttggttttgtgagtaccaggcattactttgtactgtgagagacacgtcctttgtgagtgcaacggctgctgggtcactggtgagggctgcagtttggagatggctgagagccgttgcaataaatggttgtgattgcagggggctccttgtttctttgcaagtttagatgagaaaggtgcagtttggacacagtttaaaggctgtgaaaacaccaccaatgaatatgatttcctttggggatggtctgattaaaagtgggctgattgttgctgtgctactagccttgaagacatgtttctacagcattgtgcagtgtggaaaaattgtgtggcttggtcttgtggcatgtcccttcttttagagacctcagattcaatgtgaaattcgggatttttgattttcaaagatctagatgccctgccttccagatgtgcctactcttcacatattttaaaattagatcctataaactgcaaatactttgttggcttctgtgagatcagaggtccagttagaaaaggaagacagtttgttaaaattaaaaactatttatctaatctaactagattggcctccaaatatgactttctgacattcagctggttactctgaaaagatttctaaatctcttgaggctcatctatatgtttccttgcaaagaaaaaaaaaaaaaaaaaaaagcaagcccaagcactagtaagaaaaagatttgcaatgtttcatgaaaggagtagatgagtgaagcatttatttgtagatactgggttggatacctgtgcaaagaagaagaggtcaataataaaaattgccaggggatttcttggaacttaacaagctgaattaaatatagaaatgtcaggaaatcaaggcaggaaatactcacttgtggttaggcagacagggcagggttctgagcttgagatggagcaaacagttgtggtgggtgaagttcacatgctttagagctcagctgtcctagtaaagaagcctaagagtctctaaagctcttatgagaagatggattttttttgcctagattaaaaggttaaagaattgctttaagttggataaaataaagctaaatgtttaagcaagttgtgaaaggtttatgaaaaaattaattaaaatatttttgtgtgtaaacatattgactaaagttgaaggggtataattcagcatttctgtaaattgagcattgaaataaaaacacaatgggtttctcttagagcactaacctgctctttaacaaaaattgtaaagggttatagaaagtctataaaaatgttaccttatggtcaaacattaaaattgggtaaatatgtctatcaggttttattaagaattaggtttaacattaatagtacactaatgtaaaggtgaaatttggcttatttggtacaaaaatcatacaggaagcattgtgaaatataaaatgatttttagctttctttgggctatatttctataaatatgttattgatgagggttccaaagttatgggagactcctataattctgctatatctcagtgtacattatcagtcataattataattgtcatgttaaattattgtgggccacagaggtaacagatttccttgtcaattgtgtctttgactatgactaccctaaaacgttcagtcacccatatacacatgttaccttgttttggccctctttagaaggtaattttataatcagctataaagccctaacaggtgctcttaaatgcaaattttgataactttggagattgtgacatcagaagagaggaaaaatgttcgggacacttggagagctaaaatgttcattgatatcaagcaggacaggaattaactgcatgaagtgaactaataggaggctgaagtgatctttttgactttttgcttaaaacgttgctgatcctttgttttgcttttcagagtcaaggcaaattttcttttgagctattgacagcttttaacgattaatcaaaatatactcctatgaacaccatttggagcattatttgtttctctctacccgatttccccagaatttggaaactatttgtgggtattcttaatttatggcaatatagttatttgcataagtgcaataagaatgtgttttctttggtaacaggacacaatttgaaaaactggttattttaccaaggttttgaccagaatgctgtgctttcctttaaggaatcaaacttgacttgtggagctaataaagcctttggaaaactgaccttatatcctgtgaacacagtccctgtacagggttactgatctgtgggaagaaaagaatgtcacattctgacaggtcaggaatcccaagttatcttgaaacttcaagaggacaggaattcacccaaccatatgtatttgatggtagaaatccatggcaggggctcagctttaaaaagtcttatctcagattccttctataaaacaaagtcccattaaaaccaattttaaaagcctatgtgaaaaataattattcttgctgcacctcgtacaaataaagtggcaaagcataataaagcaaattggtcctgtcgtaatttgtctttagtaaaaacgggaaactggggtcgggtgcagtggctcactcctgtaatcccagcactttgggaggctgaggtgggcagatcatctgaggtcaggagttcaagaccagcctggccaacatggtgaaaccccatctctacaaaaatacaaaaatgagccgggcatgatggcgggtgcctgtaatcccagctactcaaggggctgaggcagggaagcggaggttacagtgagtcaagatcgtgccacttcacgacagcctgggtgacagagcaagactccatctcaacaacaacaacaaaaaagggtaactggagagagggaagttatgtttcaaaaacttttggaaactatagtacacctgtttttaaattctagtctggcattcagtttttattattttctacagtttgggttaaattcgtatttctctggctacaagtctcctaaataatcttttcatttgtttcctttttctttccctttttccccatttttcttaattggaaatcactgaaacctaagctgtgctttcttaaagccctgtgaactgaagactagacaaccgaaacttctgaaggaagtagcagcaacctatttatatgtgttgctgttgcctactattatgttttagcaggtgctgcctctacacccccgaaacagagagtgctactgggaacaaatcgactttttccactccagtgctgcattcggtgccccataacgatgaccccctctcagcaggaagtagccagaaagattacaatgctccatctccctatgattcttgtgataaataaatatacaagcatgatagaaatcatgcgcaaattgacagtggggattgtggcaggccagatttcactaatggaggtccccatcacaactacttcagtactgactgagtggttaagttcagtatcaaaagctgaaagtgccagcgcctttctacaaaggctagaatgtaacaaaagcccaccaagggttttacctaggcctttcctgggccttacagcatgacaaaacaaagaaggaattcttaaccagacctgtttaggattaaacaaatttaattgggggtctgaagaaactcgccaggcctccacaaacaagttcattgggggtctaaaggaaccccccccaaacctctgtgattgagcaggagacaaggtcagggtaattgccccagcacctggactcatttagatttaagtaaatgtactgaggctccagagaaaggtctccaagacttagactagagttacagattaaaagaagttaatcacttatatctttagataaatgcacactgacacgtagacatacatcttagaaaatatataagctctggaaaaccttgtaatttacagttggtctggagatattttctgggccttctctctgtaaccggttccagaaataaaaaactctcttcctccccagtttatctgcatctcgttattgggccgtgagaaatagcagccagaccctgagtttggtctgggaacacactggctgggcttcctgcctggcggtagagcttcactgtcctccttcccagccaaaatgtggcccttgaaggcttcctccccaactgaccggttttgggttctaggtactcagggaacaccgtcttcaaggaggccattttcatactgttcctggtttgatttttctgaaattaggaaatgccccttgaggcatccaggattgtctttatttcccctgaagcttcccctcctgaagaaaaaagttctcaaacaccctcaggactcaaaccccaagttcaccctgtgaaacattcccatttcctaaacccaggcaggctcatggccctcagcctctcagaccccatggaaacctcctcccccacttcacgggttctctccatattgagagcctcccctcctcggcacacaacccagagactcaccccaacatgtgtagcaaatcaccctggaaacaatcatggctgaacgtggtagcccatgcctgtaatcccagcactttgggaggcccaggaggtggatcacctgaggtcgggagttcgagaccagcgaggccaacatggtgaaacctcgactctactaaaaatacaaagttcactgggcattgtggtgtgtacctgtaatctcaactactcaggaggctgaggcaggagaatcacttaaacctgggagacagagattgcagagagccaagatcgcaccattacactccagcctgggcaagaagagtgaaactacatctaaaaaaaaaaaaaaaaaaaggaaaaggaaaagaaaaaaaaaatcatgaggcaacattgcatttaacaatattttatttatcaaaagacacttgtctttctcaggtaagtgaaggtctagagatgaaacgagtcccgatgtaaattgccccatgggcattgctgagatcacaagatcatcactgcagcatgcagcacaatagtaaatttctcaggatggaagttcaacaatccaaaaggtagtattttttttcatgatgctcagtccatcatacgaaataaaaataaattccttttcatgatcatccattcagtagaaaaaatgatagtaaatttgttctcatgaagatttttaccgtaacatataggatttatcgttattattattattctttgttttttgtttttttgaagcggagtctcactctgttacccagtctggagtgcagtcgtgcgatctgggcacactattaacctccacctccagggttcaagcatttctcctgcctcagcttcccgagtagctgggattacaggcatgcgccaccacacccggctaattttcgtatttttactagagatggggtttcaccgcattggtcgagctggatttgagctccggacctcgggtcatccgcccatctcagcctcccaaagtgctgggattacaggcgtgagccaccgcgcccggcctcaatttatcattattcacgcatccacaaactgggttcttatattttgtacgtgattttttccattgaggagagatatctgtgcatattcatgctgctcatatttcatccacaaactcggttcatatttcatccacaaacataattttttccgttgagaagagatacttgtacatatttatgctgttcaaattcacatttcatcattcttttacaagaaatagataatgtattttaaggttttccagtggtattacagatattttactgggtgtatagatagaaattaaaccaaacttctttgttctggccgccagtcatgcatcctgttttcaacatagttcacatacaactggttgtgtaaaaatgaaattattttgtttagtacaatcatcaacagttggttgattagatttttaattatcaagttaatcattgtcattatgcttctcatcgcactcgtcattaattgctgtgggaggaaatttgttatgttccctatgagagggtgtatcacaaattcaaataagaattcaacgacaatggactgtataaaggaaataagcaagtccatggaaaacatatttttttccggaaaggattaaaatatttttaaaaaggaattaaaaaaaaattgggcacggtggcaaatgcctagagtcccagctgctcaggagatggagacagaaggattgcttgagcccaggaataagttggaggctgtagtgaacagtgattccaccactgtactccagccagggcaatagagggaaaccctctttctaaaaagacaaaaagaaacaaaacaaaacaaaaaaacaccacatcaaaaaacccaacaacaaaatgaaaaaccaaataacagcaatacaattggagctattcgatccaaagaagtaaatgaaacataaagcaaataaaagagaaaagctaatacctgtgtcctgcaggactcagtccaagttctgctctgactccctcctggtgagccaccccttaaaaagtcacttggggcggggttactttgacagacagtcttctgtcaaagagggaggcggtaaatagcacttttttttttttaatttaacgcctttccaacaaattagcggctatgttgtctaagagtgcaaatgtcagaggtgggtacaggcagcaagaccctccccacaggggcagcagaaggaggaatgactaagggaacaagactttagtgtgctcaactacacaggacaggaaacagatgctttttacaaaagctggtggacttgaaggcagaatattttcaagttcctgtaactgcgaactatgacctgtagcctgtgagagtgactttctgtggcaaaggagcttttgtgaatgtgaggaagttaattatcttaacagtgggaggttctcccggcttatctagctagaccctcgtgaaatcccaagtgtccttaggaaggggaagcagagagagatttgagtccagaagaggaagaaggtgatgtgaggcccagtaggggaacaaagggcgatggcatgtaaacacttagcccccagaagtgggagagggctggggttcatcacaccagaatccctaacaatcagccttattttaattacccttgaaatggaaggaggccttagagagccagaggcttggaggggcaccctctgctgcatacacagatcccaactgctgtgggctccaaataattgcaccagggaaatcacaaattatcaaaaataaaggatgtaaagcttttaaaaaatattaaaagcccaacaaataaaaaaagttctaaatctataaaattgacctcagtctgtatatttagatgagtcatgtgtatatagcgtttcacttcaaaatatatgataaatctctcattcattggcttaaaaataaacacttcaatcaagtctttatcagaaaaattgaaacgttaactcaattgccttttagttcatgtgactttacaaaacttaaaacaataaagtcagttttaaaaattattagtaaagtaaaagaaaaatatcttcacaatgtagacattttgtccacatgagacatgtgaaatattgccattactaaatatttgcaggtcaaaaactgtttccaaaacattttaaataatcatctggcctgtctgttttagagcattcaattctagctgaggtctggggacatgtgaaaggagccacggcccgactccgtgctgggaagagtcagacattttccacagctctgtcctttgctgtgggctctgcaactcctaccaattaaaattgcttacgtttttgttttatttttactaaagaggggttcctaaaagctaacattatactgagtatatgtaactaaaactactaagaaaacaatttcacaattatacaaatgtgccaagtaaatgaaaaaataaactgtattttaataaaggttataaaaagaaaaacatatagtggtgtgaggactgtctcaggtcttcactgagcaagggatcatgacattctatggcggacagctgaccttggctttctgctcctcttgattatgtctactaagtgacatacttactctttttccacctgtcttgcctctaagggtaacaggttttatgagatccctcctagtgctttgcaggtcagcctccctttgctgcattccaattttactgcctataccctccagctggcttttgatgacaaaagtcctggtcccagccattctcagattctgtcatccccgtgggcactatggagctcagcactatgggaggttccccaaaaatctcgttttctatgaggaatggccaccacctgcatctcagtgatgctagtgacccctttcctactcctgtgctcactggtcctcatgaagatcctggttggtctgtagccccctatttttcctattaaagagaaattacagtaagacccatttgtgtgcaaaatcaattttaggcttattacacttggcctgataatttgcataaaatgcagcaagaattcatcggccatataggctacttttgagttaattttcctgggtttttacctaaaaatatactattttggttagagtcttgtgaaaataaccaatgtgttcaattgttttattttaaaaggctcttactgaacactataaatatgtataagttgaatatacaaactatattgtcataaaatcacaacccaaaatgtggagaacgcagagggaaaggtaaatttgctcgcaaaaacatacttcacccaaataactggaaaaaaaaaaagactttcatgacccttctttaaccagagcagcagctttcaaacaaggtgtttgccttggaaatgccattcacaagccaaacggcccttgagagctgtctgtcaggcactgtagaatctagcagctcctcacagagttagaaatagtttcaggaaagagattccctgcttttagtaactgcactttatattcccagatagcgagattgtatgtaaaccatttttatcttattctggaactcttttgggtactttttttttttttttttaaatgatggagtctggctctgttgctcaggctggggtgtagtggtgcgatttcagggtatgagaaaatgcagctggacctggctctttccaggaagaccctcacagccaaggagtccaaagcctggggttttcatctaattccagtgtgactggggtaggagcagctttggtgctgggtgtgtgtgtgtgtgtgtgtgtgtgtgtgtgtgtctatgcctgtgtctgtttagggtgttaggctcgtggttgtctagatacaaatgtcccagggctcaggagccccagggttatgtcaggggcaccagatgaaggtgtcaacagaagttagggcacaagggacaaaggtgagagcaaggttagattcatttaggtgcaagaaatcatagagggaggagggagaggaagccctcctgctaccaccgaggaagaagcgcagcttaaggcagaaagcctgtccggagaggaagtgagtttgagggcagggctctctgggtaaagtacggtctgggacaccagcctgggggaagggtacagaatgcagagtggcctggcgtggggactaagaacagaggagagcagctttcactgggagggtcagtgttttcagtgtccagcactgagcaaggtgagatttgggcagcttgctgtgaaataaggtcaggctctggcattgtccccattgcgtgtgtgtgtgaggggcactttgggagagtgaactctccacctccatcctctcatacgtccttcaaccgagcttgccagttaccctgattccaaggagatctatttattgttgacaatactggatcctagcagaggctgggtaggagcctgggcacaagcaagtggaggagggggcctgggcctgaaagacctgggaggtttgagagaggacacagcccacagaatggagcagatggggtagagtcggcaagcattcagggctcctagtaagttggacaatggagaccctgaaagatccagtaaaacggggagaacaaacaggtccccaactcacatccttgcagtgcctggagcttcagactccagacaggtggggaaggaaaattgagggatgtgaacatgttggagaatgtcgtgccctgaagaatgaagaaaaggggggtgaggaatgagagcaggaacggcttccagtgcctggtgcccaggagaactcagaaaatgggtgtggtggagaggaatcgaggaaccggaagtggtggaagtgtgcagggcccctccgagatcactgtgactgccaggcgtcctccctggctggagagcttcactgtcctccttcccagccaaaatgtgtcccttgaaagcttcctccccaatggactggttctgggtcctatatatttgaaggggtggcctgcctctccacacctgtgggtatttctagttgggtgggaggagagacagagaaaagaaataagacacagagacaaagtataaagaaacaacagtgggtccaggggaccagcactcagcacaccaagggcctgcaccggcaccggcctctgagtttcctcagtttttattgattattattttcattatttcagcaaaaaggaatgtagtaggagagcagggtgataataaggagaaggtcaatgaaaaacatgtgagcaaaagaatctatatcataattaagttcaagggaaagtactatgcctggacgtgcactcaggccagatttatgtttctctccacccaaacatctcagtggagtaaagaataacaaggcagtattactgcaaacatgtctcacctcccgccacagggcagcttttctcctatctcagagttgaacaaatgtacaattgggttttacaccgagacattcagttctgaggggcaagcaggagacagtggccttcctccatctcgactgcaagaggctttcctcttttactaatccacctcagcacagaccctttatgggtgttgggctgggggacagtcaggtccttctcatcccatgaggccatatttcagactatcacatggggagaaaccttggacaataccccgctttcaagggcagaggtccctgcggctttccacagtgtattgtgcccctggtttattgagactagagaatggcaatgacctttaccaagtatactgcttgtaaatattttgttaacaaggcacatcctgcacagccctaggtcccttaaaccttgatttcatacaacacatgtttttgtgagctccaagttgggtcaaagtggctgggtcaaagtggctggggcaaagctacaaattaacaacatctcagcaaagccattgttcaaagtacaggtctttttcaaaatggagtctcttatgtctttcctttctacatggacacagtgacagtctgatctctctttcctttccctacatatattcatggaccacagtcttcaaggagtccatttcctcactgtttttggtttgatttctctgaaattaggaaatgccccattgaggcacccaggattgtctttacttcccccagagcttccactcctgaggcaggagcttctcaaacaccccccaagactcaacacctaatttcaccctctgaaaccttcccatttcttaaatccaggcagggtcatggtccttagcccctcagatgctgtggagaccttctttccctttcatacattctctcaagattaaaagccacccctcctcagcacacaccccagagactcaccccaacatgcattgcaaatcaccctggaaacagtcataagaccacactcatttaataatattttatttatcaaaagacactctttctcaggtaagtgaagttctggagaggaaaagaggagtcctgatgtaaattgccctgcaggccttgctgagatcacaaggagattgttactgcagcttgtagcacaatagtaaatttcttctctggatggaagttcaacaatccagatcgtagtatattccttttcattatgctcagtccagcaaatgtgatgataacaaattccttttcatgatcatccattcagcagagaaaatgtttgtaaatgtgttttcatgaagatgtttaccataacatacaggatttaccattatcaatgcatccacaaactctgctgttgttttttatacataattttttccatcgagaagtgatagttgtacatattcatgctgttcatatttcaaccacaaactctgctggtttttttatacgtaattttttccattgagaagtgatacttgtacatatttgtgctgttcatatttcatgtttcatcatccttttacaataaataggttatattgtattttaagtttttctaactgtagtgcagaaattgtactgggtgtatacatagatatcaaaccaaatttacttgttctggctgataatgcatcatttatttcatagattatgtatttctttgacacatttcacgtacaactaattgcataaaaatgaattttcttttagtatagacatcagcatgtgcttaattcggaatttaattgttgagttaaacatcgtcattgccttttccgttgttattaattgctctggtgggaattttgttatctcatacataagacagtgtgccacaatatctcttaaaatttcaatggcaataaactttatatttaaaaacagggaatctatggaaaacacatttttttctaaaggattaaaatatttttttaaaataattttctaaaaagttaggcacggtagcaaacgtctagagtcccagctactcaggaggctgagacaggaggattgcttaagcctacgagttgggggctgcagtgaactgtgattgcaccactacattccagccagggcaatagaagttaaccctttttctaaaaaaaaaaaaaaaagaaagaaagaaagaaaaaaagcaacaacaccaaaacctcaccaacaaaatggtaaagaaaaaaaaaacagcaatacaatgtaagctatttgatccaaagaagtcaatgaaatttaaaacaaatgaaagggaaaaagtaatacttgagtcctgcaggactcagtccaagttctgctgtgcctccctcacggtgagccacccctttagaagtcacttgggtcataagttaacccgataggaagtgtcctggccaatgaactagggaggtggtaaatggcaccattttaaatttaaattcacggccttttcaacggatcagtagccatgttgggtaagagtgcaaatgtcagaggtgaaaagaggcagcaggaccctcccctagtgcttgggcaacagaaggtggaatcactaaggggacaagactttagcatgctcaagtacacaggacagaaaacatgctttttacaaaagctggtaaatatgaagagggaacattttcaagttcctgtaaccaagaactaccgcctgtaaccggtgaaagtgactttctatggcaaaagcgtttttgaaaaggtgaggaagttaaatatcttaatgttgggaggttcttctggtttatctggctagaccctaatggaatcccaagtgtccttatggagcggggagcagagagagagatttgagtccagacgaggaagaaggtgatgtgagtctgggtgcgggacagggggagaatgatgctatgtggggatctgggctggggaatgacttagctgcatgagcggagtgacttagactcctgaactagaagaaatctagggctcatcacctcagcagccctaaccatcaaccttatttttattacaggtcttccatcgacggactccctaaaaagccagcggcgtggaggggcgccctctattggacaaatagatcttgactactttcggccctcaaatagcctgactaggcaaataacaaataataataatttttttttaaatcatggaaaatattttaaaaaacaattaaaaagttataaatctataaaatctgcttctgtctgtgtgtctgtatatttagatgtctcatgtgtacataatgtttcactaccaaaatatatgatgaaaccctcattaatcggcttagaaaactaaacacctaaatattttctcagaaaatacaaaaactttaactcaaatcccttttaattcacctgactttaaaaatctttaaaaaataaagcatgctttaaaattattagtaaagtaaaattagaacatcttcagaatttagacatttggtttaaattatacaggtcaaatactgcccttagtaaatattttcaggtcataaacaactcctgtaatcttttaaataattgaattacatgtctgttttagagctttaagttctagctaaagcctggggacaaatgaagggcaccatgccccctctctgtgctggaaagagacattttctacagctctgacccttgcagtaggctttgcaactgctacctatcaaaattgcctacatcctaagtttattattaaaaggagttgcttggagttaacattataatgaatatatgtaactaaaactatttctcatacaaagtatatgaaaaagtagaatgtatttttaataaaaagttataaaaagacatgaacatgtagtttttataaaaaacagtaattttgtctagttttgcagttctaaaaagttatgttaaattcaaaaataaaaaataacaagacaagactcaaggtttaaataagttgtaaaagatttgtaaaaattagttctataaaaattttacaaaaaaaagcattggttaaaatttaaggaattattttgtttttacagaaattaaacattcattaaaaacactctgatacaaggccttaatttgggttcatgtatcagaatagcagggttttcttagaatattaatctattctttaaaagaactatgaatgttatgcaaactttataaaaatcttaccttagagtcaaactgattaaaattccatagattttacgtaaaattttattaaaaattaacttcaacaaaaataaaatttgattttctcctttaaacaaaagttttgcgtaatattaaataataaagcatttttgtttaccttttaaactataaacacacacacacatacacatacaccaacactaaagtcagctgacctcatactgtctttattggatattcttgtttaaaaaactatcttctttggaaaataaagttttttattttaaaccatattttaaattatcattttgactaaatccataacatacagtgatctgtaataattctattttataatatcaagtgttttgaagaactccaggaacagccatgagagaacactgtggtttagtaacactttatttcctcagtttgaaaatagttgtctttcttggggaggccggtttcagcagatgaaaacaagagtcatgatgaaaattacccagcagtggttagtgtgaccataggaacattgtcatcaggtcagcagaaaacatatcagcaaatttttctcatactggcagtgtgtaggggtggatgtttacagttcctgaagccccagtggtcgtgtggtcttttagttttgccatttataggcaacttgtggtaactagctcaattagacacattccttatcacaaggacagagggctttctgtatcctagggttcttgccttggcattccagaagaatcaggtcacacgtggacgtggagaatgagtgcaaggttttattgagtggaagtagctctcagcagatgggggagccagaaaggagattggtttctccctggattggggccgttcagcagccctggctctcctctgactgccccaggcaaaatccacatcgttctataagtcggtgccctgctggtgtgctggtgcctgttgtcatgttcctcttcatgtccagccgcctgtgtgttcctccgctgatgtgctcctctcgacgtcaagcctcctgtgtgtctgactgctagggtcttggggtttttataagcacaggatgggtcttagcaggccaggatgatcttgggaaagacaacattcggtcaggaaaacaaaaatgcctgttgtcatctaggtccgtggggacaagcccaggtgtggagcttttagccagggaccacagcctcctgtatccaacacttcccttcaccttttctatatcattcaaagggatcatgcccttcccatcccagcacttcactttcatgtcatttgccccctctgaagaggtacatctaactgccattagaatatggatgatgaccagtcttagctgcttcctgctgaaagggggcattgttttgggggaaaacggcagtcagattcctcccaggggtctctataataaaagatcgaggtggctactttcaggaggtcctctaatgtactatctggtcccaagtcccatttctgcaacctcctcctgatgtcaggagctgcctgagtaataattttatcctttaggattatctgtccctcgattgaattaggagatagagaggtgtgatttaccaaggcctctcttagcctctccaggaaggcagtgggattttcatcaaatccctggttaattatggacaacttagtataattgagaggcttggtcttagacctacgtaagccctctattatgcacacctgaaagtgtctcctcttccagtcttccatctcattattgggatcccatttagggtccttcactggtgctacttctcttccagttggataatattcgctcccttccctgatgctataggtgatgcaaagctcatccccaaatctctctgctgctggcagagcagcctgcttctcagtgtctatcaggttctgactcaaaagtaacataacgtctctccaggagagttcaaatgttagggtgaaattctggaaagcttctatatatctatcagggtcatctgaacacttgcccagatctcccttaatttgctttaagtcttgtagggaaaagaggacttggaccttactgggcccaaattcactgggcatctgtaggaggggcaagagtgagactgggcttgtttgggatgaagatttctaggaggggccaggtgagaggctgaagctggatacggaggttggggtggacccagaggagcagggcttgagggagctggcacgtcagctgggggtgcgtctgggactcgtgtctttaattccctgggcttgaccctggcagccttccccgagacagcaaacaggagggctggaacaatcctacatgtcagcaaaggtctggattgctttgcaaggtatagaaagcctgcacatttggggcctcagaccatgtgtcctcacatccagagaaaagttctaattgcaggatggtattgaaatgaatggtcccttcctgaagccaagccagtccttcctgtaaaccataatttggccaaacctatgtgcggagggctatgagatgcttttcctctggattctgagggtcaaaacagtcccaatggttcaggatacactcaaggggagtacaagctgggggtggtgaggagaactggctgcccattctgaaagacagggaatagaggtgttcctcatttcccttccttcttttggcaaaaagctcagggtgtgatggggagggaaagcaagcatcttcacttcactttccacctcttacccctgcgccctggcaaccttggcaggtgccggccacaggtacaaatgcggtatgtacccatgaagcagggagaacctggagattaggaattaactgccctcacctatgtttccttttctccctgctgttgaaaaactttgagttccctgggcctttttatcccatgaggcatggcctccttctgtgggatggggttcagtcagcaggaattggtcctgtccatttacattgtgcctgttgcctggctttgaattcctcagacctgctttctctttctagggcctcagcctgaagcttggaattgagtttgggactgaaaaagcatttcagaggctgtttatatccatttagtgcctcaaataagccctgctgaatttgcaattatcagccagcaggggtcactcctctgttaacttccctattagaaacagagcggtggggattctcacttagaaaagaaaaaaagagaaaaacagttaaagaggcaaaaagtggggaatgctgggggaagaaccccttgcttagtgcaagtgggcccctctaatccttataactttcccatccttcccccagttcagaccaggttgaattccttggccatggaaggaaaggttccattgatgcagtgggtgagaagcactctgtagggtcctggctaccatcggttttctcacacccccctcatcccaggcagtggagggagacacttctgcgacattgctccccctgccccttcatggctattgggtgtggcctttgcctgctgcaggcatgcctaggtgctggagctgggagggaaaagggtaaggagaggtgccctggaagccgctcatgcctggggctgtcaaggtggaggcatacatggcacctctaggaaaaattggtctgatttgcacctttggcggctgagccaaatgctcattttacttagtaacattgcctcagcctgtagcaaaactcttaacattataaaggaagagataagatccatttcaaataatgtgtgagagagaaaagagatgaaaggaaaacagagtcttttacctgcaggaaagggagagaagtggcagagttttggaagaaaggcaggcccaacagtttcccattcactcacactcaccttccgagatcccagacgagccaccagttgaaatgggaaaagtttccttgtccccctcacaggaggtggagtgggggtgtggcttgcttctttagtactccgctgctcaaacctctagggaagcatacagactggcaagttgtggggctacaaccccatggcagcatctaggggtagatgtttacagctgctgaagccccagtggacatgtggtaccatgtgctcttttagttttgccatctataggtggctttgtggtaaccagctcaattagacccattccttaacccaaagacagagggctttctgtatcccgcggttgttacctaggtgtaccagaaaaatcaaatcacacgtggtcttggagaatgagtgcaaggttttattgagtggaagtagctctcagcagatgggggagccaaaagggagaatagttttcccctgaagtcgggttattcagcggcccaggctctcctctggctgccccagccaaactctatgtcaatccattggtcggtggcctgccagagtgctggtgcctgttggtggattcctctcagcgtcgagagtttttccctctcaggaaagggagagaagtggcagccacccatgtgttcttgcactgatgtgctcctctcgacgtccaacctcctgtgtgtctgcctgctagggtcccagagtttttttaggcacaggatagggcatggtgggccagggtgatcttgggaaatgcaacatttggtcaggaaaacaaaaatgcctgtcctcatctaggtccaggggcacaagcccaggtttggagccctagccagggaccccggcctcctctacccatcactttccttcaccttttctgtatcattcaaagggaccatgcccttcccttcccagcacttctcttctgtatcaataggtgatgtttttaaaatttcccaactctagtgcaggcatggtactagacatatacatagaaataaaaccacacttattcttctggctggcaagacatagtatttttgccaaattatgtgttgttttgaagcattttatgtacccctggtcatataaaaataaagctattttgttcagtacaaacagcagcattttctggattagaaagttaatcatcttaaaagatcatcacggatttttccattgcactcatcactaattgctttggcaaaaaatttcttatctcacgcatgacaaaatcagccgcagtatctcctagtaatttaatggtgatgatctttataaaggaaataagcacatcaagggaaaacataattttttttaaaaaaagagtaataaaactttttaaaagtcttttttaaaagactgcttttctaaaatagtaaaataaaactccaccaataaaaccaccaacaaaacagaaaagaaaaaataatgatatgatcggagctatttgatgaaagatggtaaattaaatttaaaatgattagaagagaaaaagcaatacctgtctcccgtaggtctcagtccaggttctgctatgcctttctcctggtgagccacctatttaagagtcgcttaaagcatatgttaatccaacaacagcagattaaaaaccaatgcaatctgaactatttgatctaaaaacataaataaaatttaaaacaaataaaagagaaaaagcagtacctgtgtcctgtaggtctcagtccaagatctgctctgactcccttgtggtgagttagccctttagaagtcacttggggtggggcatatgttaattccactaacattggttctggccaatgagtcaggaaggtggtaaatggcaccttttcttcttgctgatttctttcagttcctttggagtctggacattagtcctttgtcagatgcctagtttgtgactactgtttcctatactgtgggttgtgtgtttaccctgctgatatttcttctgccttgcagaagattttcggtttcattaggtcctattgatcttattctatttttatatttttgcgtttgcttttggggcattagtcatgactacttggcctaagccaatgtctagaaaagctttttggatgctatcttgtagcatttttagactttcaggtcttagatggaagtttttatatgctttgttaaagatcaggtgactgaaagtaccgggctttgtttctcggttctctattctgttccattgctctatgtgcctatttttatacttcctgcaccatttattgaataaagtgtcctttccccaattagtgtttttgcatactttgttgaagattagttgtctgtaagcatttggctttatttctgggttctctattctgttccattgctctatgtgcctatttttatacttcctgcaccatttattgaataaagtatcctttccccaattaatgtttttgtgtactttgttgaagattagttgtctgtaagcatttggctttatttctgggttctctattctgttctattgctctatgtgcatattttataccagtatcatgctattttggtgattgtagccttgtagtataatttaaagcctgccttcagatttgttctttttgcaaagtattgctttggatatgcggtcacgtttttggttttgtataaattttaggattcttttttctagttctgggaaggagaatgatgatattttgatgagaattctactgctctgtagatggctttggagagtatggtcactttcacaatattgattctacctattcataagcttataatgtgttcccatttgtttgtgtcaactgtgatttctttcagcactattttgtagttttccttgtaggaaacttacattaacctacttggttaagtatatttctaagtattttacttattaaaaattctcagggaaatgcaaagtaaaactgaggtgggaaattaaagaaaaataaaattaaaaagaaagggaaataagctttcttgtattaagctaacttgtcccagaggcagcaacaggcacagcccagacccaggaaaagtcttgataatattatttattgtattctggagactcttccagcactccttcaatgtagggagaagaaaaacaaattttcctttgttttatggtatgagtttatagattcttgttctctttaactagtaacttcaagtattctgttttatctaagaagtatggcaaaggtcatgagaagcctgagcaggcctgaactacagctctctaggcaccatagtgaagataaaccaatgcaagcctctttagagcaaaacctagataatagacatctgggttgcatagcaacagttatgtgcaatcctgagttatgaacctgttacaatttgattaactgtctttttcctgcctctgtatccctgctttcacaccactgtaagcttgcttcaagctggcccacccccttttgtgaagtgtgtataaaagtcaagtgctgtctttgttccaggccctgtctttggacgtgagtctgctgggcctgagagcactcaataaaagattctcctgttttaacccaaagcctctctctcatcctcctaaatcccacaacaaaaccacaatgagatgctatcttaatcttgctagaagcccataatttaaaagtcagaaaacaatagatgttggcatagatgtggtcaaaagggagcactttgacactgctagtgggaatttaaactagtccgaccactatggtaaacagtatggggattccttaaagaactaaaagtagaccattcattccagcaatcccattactggctatctacccaaaggaaaagaagttattccataaaaaagacacaagaatatggatgtttatagcagccgattcgcaattgcagtgatatgggaccaacttaagtgcccatcaacgaacgagtggataaagcaaatgtggtacaccatggaataatacttgataataaaaaggaacaaaataatgtcctttgcaacaagttggatggaactggaagccattattctaagtgaagtaactgaggaatggcaaatcaaatattgaatgttttcacttttaaatgagagttaagctatgagaatgcaaaggcataagaatgatataatggacttggggactcagggggaaaggttgggagggggatgaggaataaatgatgacatattgggtatattatacactgctcaggagacagatgcctcaaaatctcagaaattaccactaaggaacttttatccacataaccaaaaaccacatatattccacacactattgaaagaaacataaacattattttaaaaaataaagccacttttaaaattagcaaaataaaataaatatgtcttcagagtttagatattggatccaaattagacagatcaaatactgcctttactaaatattttcatgtcattaacaacttctaaaacctttcaaacagttttttgacatgtcttggaaccatccatttctagctaaggcctgggcacctgtgaaatagggccatgcccccccttatactgggaagagtaagatatttcaagactaagatgttttctacagctccatctttttctttaagctctacatcaaggacataattaaaattggttgtctcctaagtggtttactaaaaatgcatacttaagagttaccattataattaatatttgtatctaaagctacttaaaaattttcacacacaaatctgactgaacaagtaaaatatattttaagtcaaagtttataaaaggacatgagaacatagcttttatgaaaaaattagttttgtcaagtttagaggttttcaaatattttaaattcaggaaataaaataacaaaaagacaaaagaaaatggttgaacaacttagaaaaggtttgttaaaattcatcttataaaacaatctacatgtaaaaagtgggctaaaatttgaaagagattatttaggttttccataaattaatccagaaggggtaggaagtcttaagaatgaggaaggacaggaggaaggggaggtcatcctgacactgcagaggcagaagtgcagctgaaggtatgaaggctaagaggggaggggagtttgagtgctgctgcctggctgtcagagcagaggagggtcctgggcaccagacttgaggaagggatgaaaatgctgggcagacctgtagtgggcccttgagatggcagatagtggtttccagagagagggccattgttttccagtgcccagcactgagcagagagagttttgggcagtgtaaaaaaaaaaagagaacttacctctttctcgttttagaaaaagaacagtctaagaatatcagcagggaaactctcagtgcttcaaggggttaaacgcccttttggctttcttgtgttggtttcatcatagaggaggagaaacttcttggaagtgttcctaaaaacacaacacgtctgcttctcctttcaaaaaaggaagtgctaaaacacgaacactctagatccaaatattaatacggatgtctaaatgcttccgttttccaaggggcagaaagctaaaggttgtaacctattcatttcagtcaaagttggtgaaagggaagcaaaggaactgggtggggcttggaaggatgacgaagctcaagctcattggccagcaacctctctcctgggggcgggaggggtgagcatacgtcattgctttggcttctataaaatgaggaggactcaccgagtgtgaagagtccttctggtgattgcagctgagagcacactcacgacgttctgcaaggattctctgattatgattctgaagggaaaagcgatggaatggacagcagagattgtaattttctttatcttgaattacggaagaaagtatctaggacagaaatccacgacaagtccttggaaccagcagatctcttcgttcacggagacgttgacgtattctctattgaagaagattcttaccttcttactggacaaggttttgtcagttctgcgtgactggattgtccgggagactctgaggaaactgatgtcacatgtttttccaaagaagatgtttctggaaccaacaactgtgattgtggtttgaggacttctgagagttccagtacaggaaataagcagaacatcagctggaggctaaacggatccagacttcactcttcacttcccttcctattcagtctattgtgcctgctgactgagaagcttggctggtatgtgagcaaataaacggaactattcagaaggagatgttgacatattctgtattgaagaagatccttatcttctcacctgacaaggttttgtcagttctgtgtgactggattgtccggaagactctgaggaaactgatgtcacatgtttttccaaagaagatgtttctggaaccaacaactgtgattgtggtttgaggacgcctgggagttccggtatgcgaaataagcagaacatcagctggcggctgaagggatgcagcctccactcttcacttcccttgccattccatctattgtgtctgcctgactgagaagcttggctggtatgtgaggaaataaacggaattataaacaaggagattgtttctcatctacttcattctgttgtggcttttctattttggggttcagggtgtgtgacaaggaccaaggagatgaaaggtttcatgatggagaaagcccaggcaatcagattgaagagctatccacagggaatcttggctgctgaggggctgcaccctgcaacggactgaccatatgacagaaaagggttttaaaggctcaacttctggactgagaacccagagtaatttgggaacctcctctgtgaggagatatgaaagctgggaatcatgacatccctaggaatggaaggcacatttcctgatggaaggggtgctttggaaaacaggagcagagtagacacagcagccttgtggatacgggtgggcagcatgcatgggtgatgtgaacgtggagtgtttgtgatcgaaactcaaaatgtctgacaaagtgaaaacctagaaaccacaatgaggaggaagagtttgtgagggcaatcactctccccatgtgtgaaaatcgggggctcttaaaatctcatctggagaggtgcagtctaccaaactctgggactttagcctccccttttaaaaaaccgtgcatcaataccaacgtccgaaaccacagaaataacacctggcttgcatggagacaaggacaaaaagccgtcatgatgagttgttctgctcacttgctgcctctgttcagtgcacaggatattgtccacccactagcaggctactgcaagagaagtgtgcaatatgttccctatgtgccatatatgtgccatatggcccatatgacaactgagtcagaaaatatctgatgccctcagagttacactccacctggagcttgcccccagccatccaggacctaggctccctaccctgtccaattttctggtgttttgggggcttcattctctaaggtgtgcccactctttactcaaaccaaaacacccacatattcctgcccatgaacaaccaatcaaccacttctcagttccacatcctgctgttgggtctctagtggtgacactgtaactcccaggtcatagtggtgacactataacacctagctaaattgatgccttgtctctaggaggccatgggctcctgcaggtctcatctgactctctgtagccttccctgacaatgctcacaatacccaagccagagccacattgacagcaagctgctctcatcttacctttgccagacctggccactggaaaaggctgaccctcatcctgcaatgcctatacctccaacctttgtctcaagctggtgtcctggagggacttctaagcagaaaacagattcagactcccatcctctcctgaatggcctcatatccaattctcagaccctcagccttcattgtaaggacacttcatccatgcccttgagtattctgtctgcactgtgtattctgcaatagattctcctccctctgcgaccctcaactccttccgcagactttttgttttcttgatcatctaccatagtcttccactgggacactgccaagcccattctggagagtgagttgtgcaagtacactgccccccatctacctttcgggaggtgtatacacccttctttctcccaggtctggaggctttctattttcatcctgaggcatctccacctgctcttggattcttcaaattgacaaccaccagttaacaagaactatgtgtcaccaaatagccaaacaatggcaattacaaaaataaaattaatagctgtaacccccattagcaaggatacacaaatcaaatcagggatagtgggtgaggaagtctgcctaacattcaaggaaggattctgaagtgatacaaaatcattgcctttgctatctttagaatggacactttcagccaggcacagttgctcagcctgtaatcccagcactctgagagccccagttgggtggatcacttgaggccagcagcttgagaccaccctgggcaatgtgcagaaaccccaactctactaaaaatacaaaaatagccagttattgtggcacatgcctgtaatcccaactccttgggaggctgaggcacaagaatcacttgaatctgggagccagagtttgtaatgagcgaagatcatgccactgcactctagcctaggcattagagtgataatctgtctgtggaaaataaaaacattcctcttcaaagttttcttctttaaatcataaatgttggaattaatatatcctctttgaaactcactttcttcaagcttctttatttgatggtagtaaatctttgttaagctttatgaggcaagagtaatggaagaagcatattatatatatttatactctaacctcagtgcttgttctagcaagctcaggcatgcgtgaatgtgcccaggcatgttccagcccataccttatatcctttccttattgggaaatgctgttactcctataagcattcttgtaagcaacttcctctttttctttgtctccactatctttacctattgaggacagttttaggttcttagccagttggatgtagcatagactgtgaggtccaaccccagccaatggagatagcacacagcagtagcgacctcatgcttaacagataaatattcctgtctccctttgtttggggtgctctcagctgatgagcaacaccctttctaaagaaattaaagttgtcttgctgagaaaacttttggtctaaatgctgattcttccttgcagcactgaagaagaagcaattatttccaacactttctcatacacaaaaaaagaagaaggtggaagaaaactttcttgtgcaccctatccctcactcagaaagacaacagaaggctcctagtggcaagccctagaggattcatttcttttgggaaccctcttggctgggatactaggactcaggtcaaactcagcattttcagtgtgtgggaagtgtgcttgggtttcactgttacttccaataatgtgatttggtccttggggttcaccaaattttggtatggagtggtgaaccctgttaagtttaagtgtctataaaattaacaaagcaaaataaccattctgccccatggttcagagaccaaatattgtgtaggaaatgctttagcgagagaaacagagaagaataaaaaatgtcctcaagcgctgcattatttcttgttatcgtccagatcttagaggaaaggctttcattttccctcattcagtatgatattagctgtgcatctgtcatttatggcttttattatgttggggtatgttccctgtgtatgtagttttttcagggtttttgttatgaagtgatgttgaactttatcaaacgtttttcagtttcagttgaaacgatcatatgctttttgtccttcattctcttgatatgatgcatcatgttgatgatttccatatggtgcactgtccttgcatcctgggcatgaattccacttgatcatgacaaatgaatttttaatgcattcttgaattccgtttgctggtattttgttgaggatttttgcatcaatattcatcagagatattggcctgcagtttctttttttttcttttttctttgttttgttgtttgtttgtttgtttgttttgatgtgtctatgtctggttttggtatctgggtagtagtgttccatccccttttattttttagaataatttgaataagactggtgttggttctttaaatatttggtagaattccgaagtgaagtcattgggccccgggcttttctttagtggaaggctgtttattatggcttcaatctcgttacttattattggtctattcatgttttgaatttgttccttatttaatcttggtaggctgtgtgtatctaggaatttgtccatttcttttagattttcaaatttattggcacataattgcccattgtagcctctaatcgtcatttgagttcctgcagtaccaattataatgtctccttcttcatttttgattgtatttatttggatcctgcccctttttttcttacttaggctgcctaataatttcttaattttgttgaactttttcttttgtttgtctcgctctgccaccaggctggagtgtagtggtgtgatcttggctcactggaacctccgtctcccaggttcaagcaattctcctgcctcaccctcccaaatagctgggactacaggcaagtgccaccactcccagctaatttttgtatttttagtagacacgggttttcaccatgttggccaggatggtctcgatctcttgacttcataatccacctgcctcagcctcccaaagtgctgggattacaggcatgagccactgcgcccagcctaattttgtttaaattttcaagaaatcaacttcttctttcattgatttctgtattttttatttccattttatttatttaaactctaagctttattctatcttcttctcattttagctttggtatgcttattgcctctctagctctttaatgtgcattgttagattgtttatttgaagttcttcctctctacaccataagacgtaagcatgtcctcattatgtcataagatgtaaccacttacagctataaacttccttcttagttctgcttttgctgtatctcataggctttgttatgttgtgtttccattatcaattgtgtcagaaatttttcaatatttttcttaatttcttcattgagcaactgatcatttgggagcatatttttaaacttccatgtacttacatagtttccaaaatacctcttgtgatcaatttctagttttattccactatggttcaagaagatgcttgatattatttcaattttttttcacattttaagatgtgttttgtgacctaacatatggtctactttttttttttattaaactttaagttgtggggtacatgtgtagaccgtgcagttttgttacataggtatacacgtgccatggtggtttgctgctcccattaacctgtcatctacattaggtacttctcataatgctatccctcccctaacctccaccctctgacaggacctggtgtgtgatgttcccctccctgtgtccatgtgatctatttttgagaatgatccatgtggattagaatgctgtggaaaagactttggattcctaatatccagggagggagacgatgatattactttcaatatcacacgggtgtacacactctctgtgacattgttcctaatatccagtggaagagaggatgatataacacccagggagggagaggatgatattactcttaatattgcagggtgtgtacccatgcctatgatattgttcctaatatcaggagggggagaggatgatattactcagaatatggcagggggtgtacacacactctgtgacatggttcttaatatacaggggagaatgggacaatattactctcaatatcgcagggggcgtacaaccctgtgatttgttcctaatatacaaaaggggacagtatgatattgttcctaaaatcgcagaaggtgtacaacgccctgtgatattgttcctaatatccagggcgggagaggatgatattacccccaatatcacagggggtgtgcactttccctgttacattgttcctatgatccgagtggggggaaatgacattagtcccaatatcgcaggatgtgtacactactcccccatgatattgttcctaatatcaagggggagagaggaggatattactcccaatatcgcaagggaggtacatcctccatgcaatattgttcgtaatattcaggaggagagaggaagatattactctcaatatcgcagaaagtggacacccaccctgtgatgttcttcataatatccagggaagcagacgattatatgactttcaatatcgctgggagtgtacatcccttttgggatattgtttctaatatccaggaagggagaggattatattacttccagtattgcagccagtgtacacatttcttgtgatattgttcctaatatccagaaagggaaaggatgatattactcccaatattgcaggtggtgtacacccccctctgatattgttccttacatcaaggaaaagaaagaagaatattactcccaatatcgaagagagtgtacacccctcctgtgatattgtatttaatatccatggggaaagaggatgttgttactcccaatatcgcagggggtttacacccacactgtgatattgttcctaaaatccagtgaaggagaaaataatattgctcccaatattgcagggtgtatacaggccctcccccgttatattgctcctaatatccagcggtggagaggatattactttcaatttttgcagggagtgtgtaccccctctctgatatttttctaatatcaaggatgggaaaggatgccattactcccaatatcgcaggaggtgtacatgccctgtgatattgttcctaatatccagggaggtagaggatgatattactttcaatattgcaggggctgtacaccctctatgatgttgttattaatatttaggttgggagaaaatgatatttttcctaatatcctgggaaggaaaggatgatattactgtaaatattccagggagtgtacaccttcctaatattctaatattgttcctaatatccaggggtgggagaggattatattactcccaatatcgcagtgggtgtacacccctcctgtgatgttgtttctaatatccaagcgaggagaaaatgatatcactctcaataccgcagggggtgtacaccttccccatcatatcgttcctaatattcagagggaaagaagatgatgttactttcaatatcgcaggggttgtacacaacccctgtgatatttctcctaatatccaggaagaaagaggatgatattgctcccattatagcagacggtatacgcctccctgtaacattgtttctaatatcaagactgggagaggatgatatcacttccagtatcgcaaggggtgtacacctcccccgtgatattgttactaatatccagggggaagaggataatattactttcaatattgcaggggctgtacacccccgtgatattgttgttaatatttaggttgggagaaaatgatattagtccaaatatcgcagagagtgtacacacttccgataatattgttcttaatatccatgggggagacgatgatattacacccaatatcgcagggggtgtagtctccccttgtgatattgtccctaatattcagggaagtaaacgatgatgttagtgtgaatattccagggagtgtacaccccctttgtgatattgtcctaatatccgcaggagagaagataatattactcccaatatcgcagggggtgaacacaccccctgtgatattgtttctaatatccaagcgaggagaaaataatattactcccaatgtctcaggggatatacaccttccctatgatattgtttctaatattcaggtggaaaacgggtgatattactcctaatatccaggaagaaaggggattatgttactccccttatagcagggggtatacacctcccctgtaatattgttcctaatatcaaggctgggatatacgtggggggaaggatgatattactcccaatatcacaggggttataaaaccttctgtgatattgctcctaataaccatggcggaagaagatgatattactcctaatattgcaggaggtgtacactcccccattatgttgttcctagtatgcagaaaaggagaggatgacattattgccaatatcgcagggtgtgtacaccacccatgatattgttcctaatatttagagggacagaggatgatattactcccaatatcgcagggggtgtacacgcatcccctgtgatattgttcttgaaatcgaggggaaagagaattatatttctctaaatattgcagagggtgtacaccgccccctgtgatattgttcctaatagccgggggcggggggagataattaaattactttcaatatctcagagagtgtacatcccccttgtgacattgttcctaatatccagagcaaaagagaatgatattcctcccagtatcgcaggaagtgtacatttaacctgtaatattgtttctaatatccagggggaagagaatagtaatactcccaatatcgtaggggttgtacaccttttctgtgatattgttgcaaatatttagaagagagagagaatattactcgcaatatcacagggaatgtatacttcccctgtgatattgttctaatatctagaaaaagagaggataatattactcctaatattgcagggggtgtacacccccacttgtgatattgttcctaatataaaggaaggtcgaaaaacaaacggggagcccagggggaaggaaggcaggcgaggaagaggcagcgccggggcgccggagggagcagccgggccgcggaagcgcgagcacgagaccggtcgcggtcgcagtcgcatttttgccgttgtcgcggccgccgccgccgaggcttacccggggatgtctgagcccgcgcctcgcggcccccaagctccacgctgcgcccgctgtcccggcctctaagggccgccacgtccctgcggcgcgcgcaggcagaaagcggcttcgtgccggcggagggggcccgggcgggccgggaaaggctgccccaggccccgcgcctaccccatcaccgcggccggcgccgggccgggaggatgagcggtgtggggctctgaagcatggagggggttttgtacaagtggaccaactatctcacaggttggcagcctcgttggtttgttttagataatggaatcttatcctattatgattcacaagatgatgtttgcaaagggagcaaaggaagcataaagatggcagtttgtgaaattaaaggtgacagctttggaggggaccacccttgattggatacataaattctgttcattcagcagacaacacaagaatggaattaatcattcctggagagcagcatttctacatgaaggcagtgaacgcagctgaaagacagaggtggctggtcgctctggggagctccaaagcatgtttgactgatacaaggactaaaaacgaaaaagaaagaagtgaaaccagtgaatcgctgaaaaccaaaatgtctgaacttcgcctctactgtgacctcttaatgcagcaagttcatacgatacaggaatttgttcaccacgatgagaatcattcatctcctagtgcagagaacatcaatgaagcctcttctctgcttagtgccacgtgtaacacgttcatcacaacgcttgaggaatgtgtgaagatagccaatgccaggtttaaacctgagatgtttcaacggcaccatccggatcccttagtttctcctgtgtcaccttctcctgttcaaatgaggaagcgttctgtcagccaccctggttcttgcaccagggaggagtagccactgtataaaagaaccagtatctgcacttcaccgactctcccagcgacgccgaagaacctactcagatacagattcttgtagtgatattcctcttgaagacccagatagacctgttcactgttcaaaaaatacacttaatggagatttggcatcagcaaccattcctgaagaaagcagacttatggccaaaaaacaatctgaatcagaagatactcttccatccttctcttcctgaagaaactgtagtgtccaactttctctaagtattgctatgcaaaagctgctgtaattgaactattgttatagggagtagttttttcccttaggactctgcactttatagaatattgtaaaacagacaaacaagaaaacaaaccacatacttttgaagcgtgttttatctttatatagtttgtttgcaagagtattttcctaataacttcacagtatgaatgtgcatcttttttttctttttttaacaaatgatggtgtaacattttgacatccataaggacaaatgtagatatttttctaaaaaaccgtgaggggactgacagcttggtcagggtgtattgtagcttataaacatgaaatcttacaaggtttcagtttgacagaagtgtgatatatgtaacttgtgccatggaccaaatggtcactttaccacagctaaaaatgagttatgatagcagcttgatggtgattgcattgtattcctttaatcaaaaaggaaacgcaatattctaagtatctttagcccaaataccatgacatattgagcatctttaaataaccagactgtattgtccttcatatgtgaagttgacactactgatttgtcaataccaaattttgggttaaagtgtttaatttttatttatttattttcttgttgcctcaaaagatgattgcattctaacttttgtgacctaccaaatttaagatgtgtatacattgttctttacgttgttctagaaaagagattttaatgctgtagtgacttagctcacttacatcagagaaataaacaactttcaatggaaaaaaatatatataaaggaaggaagaggatgatattacttctcatatagaaggggttgtacaccccccttgtgatattgttcctaatattcagggagggagaggattatattactcccaatatagcagggagtgtacacccccccccccgtgataatgttcctaatattcagggaagcagaggatgatattactttcaatatcacagggggtgtgctgtccccctgttatattgttcttaatattcaggggggagaggatattattatgcccgatatcacaggagaagtacaccccacaagtgatattgttcctaatatccaggggtaaagaggatgatatcgcaggtggtgtacacccctccccgtgatattgtttctaatataaagaaggagagagcatgatattactcccaatatcgctggaggtctacaccccccttgtgatactgttcctaatatccaggaagggaaacaatgatattgctgtgaatattccagggggtgtacacccctttgtaatattgttcctcatatccagggggtagagaggatgatattactcccaatatcgcagggggtgcacggccccactgtgatattgtttttcatatccaggaggggagaggatgacattactctcaatatggcagggggcgaacaccccctgtgatattgtgctagttaggttgggagaaaatgatattactcccaatatcgcagggggtgtacaccgctcctgtgatattgttcctaatatccatgacgggagaggatattactcccaatatcgcagggggtgtacctctcccctgtgggattgttcacagtatccaaaagggaagaggatgatgttactcccaatatcacagggagtgtacaccaccattgtgatattgttcctaatagccagggaagaaaacgatgatattattgtgaatattacagggggtgtacacaccccctgtgatatggtttttaatatacaggttggaaaaggatgatattactcccaatatcacaaaaggtgtacacacccccccatgatattgttcttaatacttcggtggggagaaaatgatattagtctccatatcacaggggtgtgaactcctccggtgatattgtttttaatatcaagaggggaggagatgatattgctttcaatatcgctgggggtgtacatccctcctgtgatattgttccttatatccaggcgaggggaaaataatattactcccaatagtacacaccccatgtggtattgttcctaatactcagggggaaagaagataatattactttcaatatcacagggtttgtacacctttcctgtggtatagttttcaatatccagggggaaggtacatgatattactcccattgcagcaaggggtgtacacacctcctgtgatattgttcctaatatccagaagtggtgaggatgatattactcccagggggtgtacaccccacctatgatattgtttctaatatccaggggaaaagagtgtgatattatgcccaatatcgcagagggtgtacacttatcctgggatattgtttctagtatttggggagggaggagaggatgctattattctcaatatcgcagaaattgtacacccccgctgtgatattcttcataataatcagggaaaaagaggatgatattactaccaatattgcagggggttacacttcccctttggtagtgttcctaatatccaggaagaaagaggatgatattaatcccattttccaggaagtgtacacccaccgtgtcatgttgttcctaatatccagcagggaagaggatgatattactcccaatatcggagagggtgtacacttcccctgttatattgtttctaatacccagggggaagaaggatgacattactgccaatatcacagggtgtgtaccccaccctgctattgttcctaatattcaaaaggaaagatgaaaatattactcccaatatctcagggtgtgtacacctctcctgtgatatcgttcctaatatccacaggaagagagaatattactctcaatattgcaggggggtgtacacccccctgtgatattgttccaaatattcgggcggggagaggatgatattagtcccaatatcgcagggggtgtgcaccaacctgtgatattgttcctaatatccatgcgggggaggacgatatcactctcaatgtcgcaggaagtgtacacctctcttgttatatttttcttaatatccaggagggaaaagatgatattactgccaatatcgcagggtgtgtccaccccccttttatattgttcctaatatccaatggaaaagaggatgacattgctctccatatcccagaaggtgtacaacgcccctgtaatattgttcctaatattttgggggaagagaggatgatataacttataatatcacaggaggtgtacaccacccctatgtattgttcctaatatcctttaagggagaggatgatattactcccaatatctcaggtggtgcctattccccctgtgatattgtttttaatatccaggggaagagagtatgatattacgcccaatatcgcagggggcatacaccctctctgagatattgttcataatatatagagggagagaggatgatattacttccaatatcagaggtggggtacaccccccggttatattattcttgatatccaggaggggagaggttgatattactggatatatagcagggagtgttcacatcttctgtgatactgttcctaatatccagaaaagtagaggatgatattactcccaatatcgcagaacgtgtacacctccctgtgatattgatcctaacattcaaaggggagaggatgatattactcaaaacatcacagggcatgtacactcccctgtgatattgttcctagtatccagaagggagcaagataatattactttcaatatcgcagggggtgtacacccctctttggtatgtttcctaatatccagaaggaaagagggtgctattactttccatattgcaaggggtgtacacccccctgtggtatggttcataatatccagggagggaaagggtgctattattccccatatcgcgaggcatgtacaccctgctgcggtacggttcctaatatccagggggaaagaggatgctattacttcccatatcgcggggtgtgtacacccccgtgtggtatgttttgtaatctccgggaacgaagagggtgttattacccctcatatcgctggaaatgtacactcccctgtggtacggttcacaatatccaggggattgagggtgctattactccccatatcgcggggggagtgcacctccctgtggtatggttcgaaatatccagggtaagagagggtgctattattccccattttgcaggaggcgtacacccctctatggtatgttttgtaatatcccaggtaaggggtgctattgagagaagagagcaaaagaccccccccatattgttctgtattattttatactcagtacctgttttaagaagaaacaaggaagcgaaaccaaaggcaggcagcccggcgccaggcaccagatccaaaaccagacccgaaaccaggcctgggccttcctgaccttagcctgaaagttaaaattcaacccatgacctagcaactgatgttatccatagattccagacattgtatggaaggacattgtgaaatttcttgttctgttctgtttcactctgagtactggtgcatgcagcccttgtcacatacccactagattgctcaatcaatcatggccctttcatgtaaaaaccttagtgttgtgagcccttaaaaaggacagaaattgtgcactcaacaagcttggattttgatactctagtctgctgatgcttccagctgattaaaagccacttccttcactacctcggtgtctgtgggattttgtccgcggctcctcctgctacactgtgactccccttatagagaggggtgtacacccccctttggttcctaatatccagcgggggagtaggtgctattactccccatattgcggggagtgtacacccccttgtagtacggatcgtaaaatcaaggagggagagaaggtgtaattatccccatatcacagggagtgtacacccctttgtggtatagtttgtaatatccacgacgggagagaatgctattactccccatatcgtggagggtgtacaccgccctgtagtatggttcgtaatatccggaaggggagaggttgctattactccccatatggtgggaagtgtacacccccatgtgatatggttcataatatccaggggggtagaggatgatattacccacaatatcatagaaggtgcacacccttttgtgatattgtccataaaatccagaaggggagaggatgatattacttccaatatcacagggggtgtgtagccccatatgatattgtttgtaatatcaaggtagggagaggatgctattccttacaatagctcaaggggtgtaaccttcttgtgatattgtttgtaatatccagaaggggagaagataatttttttattttaaaagtaaactttaatgtcaaaaatgcaaacttgagaagggcagaaagatcaaacagaaggctgccacttcacaattggagggttgcacagtggccgggcagaggcgctcctcactccccagacggtgaggcagccgggcagaggtgctcctcacttccgagatgttgcaggagccgggcagaggtgctcctcacttcccagaacagggggctgccgggcagaggtgctcctcactgcccagacggtttgcaggcctggcagaggcactcctcacttcccaaacggagcagcggcaagccagaggcgctccacacttcccagatggtggggcagccgggcagaggcgatcctcacttctcagagggtagggcggcccagcagaggcgctcctcacttcccacatggtggggcggcaggctagaggcgatcctcacttcccagacggtggtgtggccatgcagaggtgctcctcacttcccagatggtgtggccgccgagctgaggcactcctcacttccctgacagtggggcggctgggcagaggcgctcctcacttcccagacacttggactccgggcagagactctcctcatttcccagatggtggggctgccgggcagaggcgctcctcacttcccagacggttcagaggccgggcagaggcgctctggggagaggataatgttactcccaatatcgcagggggtgcacactccctgtgatattgttccgaatatccagagggggaaaggatgatatagctcccaaaatcgtggggagtgtacacccccctgtgatcttgtttgtaataccaagaagaaaagagaatgctattatttccaatatagcagggggagtacaaccccctgtgatattgttcgtaatatctagggggagagaaaattatattagtcttaatatctcaggggacgttcatccccctgtaatattgttggtaatattcagaatggagaagatgatattgttcttaaaatacaggaaaaaatatgataatattacttccaatatcgaagggggtgtacactctcctgtgatattgttcccaatatccagaatgaaagaggatgctattactcccaatatcccagggagtgtacacccctttgccatattgttcataatatccaggggaagacaggataacattactcccaatatcaccgggggtgtccacccactagtgatatttattgttcatcatatccagaaaaggagaggatgatattactcccaatattgcaggtggtgtacggtccctgtgatattctttgaaatatctagaaaaggagaggatgatatcactccgagtatcacagggggtgtacacccccctgtgatattgttcgtaatatccaggggagaaaaggatgatataattgccaatatttcaggggatgtgcacctccctgtgatattgtttgtaatatccaggggtggagaggatgatattactcaaaataacgtaaacatcctgtgtgtacatcccctgtgatattgtttataatatccaggggggtagaagatgacattacccccaatatcacagagtgtacacacccctgggatactgttcataatatccaggcgggaaagaatgaactacttccaatatcgcaggatatgtacacccccctgtgatatatttcctaatatttatgtgggtaaggatattacccccaatatcacagaaggtgtacatcctctttgtgatattattcctaacatccaggaaaggagagaatgatattactcccagtatcgcagggggtgtacaccacccctgtgatattgttgctaatatccagggggagaggataatattactcccaaaatcacaggggacgtacactcctcctgagatattgttcctaatattcatggggaaaagaatgctactactccaaatacagcagagggtgtacaccatccccgtgatattgttttttatatccaaagggtgaaaggctgatattactcccaatatcgcagggggtgtacaggccccccatgatatcattcttaatatccagggaggcaaagaatgatgttactcccaatattgcaggctgtatacaccccccgtgatattgttcctaatatccagagtaagagaggatgacattgctcccaatattgcaggggttgcacgcacgccctgtgataatattactcccaatatcaacagtgggtgtacactcctcctgtgatattgtttgttatatctaagaaagaagaggatgatattactgtcaatatcacagaaggtgtacagccccttgtgatgttgtttctaatatccagcggtgagaggatggtattactcgcaatattgtagggggtgtccaacggccctgtgatattgtttctcatattcaaaaaggaaaagaataatataactccaaatatcgcagggtgtgtacacttccctgtgatattgatcctaatatccaggaagagagaggatgatattaatcccaatatcacagggggtgtacatcgcttctgtgatattcttcctaatatccagggggggaggggatgctattactcttaaaatcgcagggaacttacactcccactatgatatttttcctaatatccaggaagggagaaaatgatattactcctaatatcacatatcacaatgggtgtacatctccccgtgatattgtttctaatatcaaggatgggagaaaattatattactctcaatatcgcagggggtgtgcacacctcctgtgatattgttcctagtatccagcggaggagatgatattactttaaatattgtagaaggtgtacaacccccctttgatattgttcctaatatccagggggaaaggagatgatattactcctaatatcgcaggggctgtacaaccctatgtgatattgtttcttctaatatccaggggtggagaagataatattactcctaaaatcgaaggggacatacactccccctgtgatatttttcctaatatccagaaggaaagaggatgatattactcctaatattacaagaaatgtatacctgtcctgtgatattgttcctaatatccagaggggtaaatgattatattactcccaatatcgcaggggtgtacaccttccctgagatattgtttctaatatgcagtggaggagaggatggtattactcccaacatcacaggagatgtaaactccccttgtgatattcttcctaatgttcaggacgaaggagggtaatattactcactgtattgcagcagggggtgtagagccccctgtgatattgtttttaatattcaaggttggagaaaataatattccttccaatatcgcatggggtgtacacccttctttttatatagtttctaatatctggggggagaggatgatattactcccaatatcgcagggggattacacccccactgtgatattgtttttaatatccagggtgggagaggataatattactccaaatatcccagggctatacaccctccgtgtgatattgtttctaatatccagaggaagagaagatgatattactcccaatgtcacagggtgtgtacaggccttctttgatattgttcttaatatccatgagggagaggatgatattactcccaatatcgcaaagactgtacaccctttctgtgatattgcttccaatatccagggagggagaggatattacactcaggatcacagggggtgtacaccccaacctgtgatattgtttctaatatctagggaaaatgagggtgatattactatcaatatcacaggaggtgtacactcccttatgatattgttcctaatatccaggagaatgacaggataatattactcccaatatcgcgggtggtgtctccccccactccgtgatattgttcctaatacccagagggggagagaatcatattactcccaatatcgcaggggatgtacacctacatccggcggagtagaagataatattactcacaatatcgcaagaagtgttcaccttccctgttatattgttgctaatatccagggagtgagaagatgatattactttcaatactgagcgtgtacactacccctgtgatattgtttctcatatccagtagaggagaaaatcatgttactcccaatattgcaggggtgaacacctcctttgtgatatttttcctaatatcaggaaagggagagtatgatattacccttaatattgacaggggtgtacacccccctttgatattgttccaatatccaggggggcagaggataatattattcccaatatcgcagagggtgtacaccccccgtgatattgttcctaatatccagagaaataaaaaatagtattatttccaatatcacagggcgtacattttccctgtaattttgttcctaatatctggggggtggggtggcaggataatattactctcaatattggagagggtgtacacccccctgtgatattgttcctaatattcagggtgggagagaatgatgttactcccaatatctcaggagtcgtatacacccccttgtgatattttttctaatatccaggaggcagaggatgatattgctcccaatatcgcagggggtatacacccgagctgtgatattgtttctaatatgcaatatgggggaaggatgattttactttcaatatcgcagggaatgtacactttccttgtgattttgttcctaatatccaggggtggagaagatgctattactatattactcctcatatcgcaggcggtgtacaactccctgtgatatggttcagaatatccagagtgaaaaaggagggtgacattactcccaatatcgggggggtgtacacccctttgtgatgtggttggtaatatccaggggggcagatgagggtgatatcactccccatatcgtggaaggcgtccacttttttgtgatgtggttctttatatcccgaggggagaaggtgatattactccccatatcgcgaagggcatacacccccctgtgatatagctcataatattccggagagtggaggaagatactatgccctatatcgcgggtggcctacaaccccctatggtttggcttataatatccaggggggagagggtaatattgctccccatattgtggagacgtacagccccctgtgatatggtttgtaatatctttggggggcgagggtgatattactccccatatcgcggggagcatacacccccgtgatctggttcatagtatctcaaaggaagaagttgatgtgtacaacttaagggaaaaagttgaagtgaagtgtacacacgccctgtgacgtggttcataatatccaggcgggggagaggagagtgatatttactccccatatcgcgggtgttgtaaactcccctgtgatatagttcataatatccaggggagagaggagggtgatattgctcctcatatcgcgaagggtgtacaaccccctgtgatatggttcataatatccagaagggtagaggacgatgatattactccacatatcttgggaggtgtgatatggttcgtaatatccagcgatgagagaatgatattactccccatatcgcaaaaggtgtgatagggtttgtaatatcctgagggggagagggtgatattaatccctatattgcagaaggactacaccctcccatgacatggtttgtaatatcccagggggtagagtgtgatattactttccatatcacagggggtgtgatatgattcgtaatattcgaagggggagagggtgacactactctccatatcacggggtgtgtgatatggttcttaatatcccaggggttagaggttgatattaccccctttttggggggtgtgtacaccccctgtgatatggttcgtaatatcccgggggagacagggtgacattattccccatatcgaggggatcgtacaccccctgtggtgtggttcataatatccctagggggagatggtgatattactccccatatcagggggcgtgcactcttctgtggtataattagtaatatccagggggcagaggtcgatattcgtttccatatcatgaagggagtacacttccctgtgatatggttcctaatatccaggggggagagggtgatattattccccatattgcggggggacatacaacccctgtgatatggttcataataaccagaaaagaagagggtgatattaatccccgtattgcagagggcatacaccccccctgtgatatggtttgtaatatctaggggaggaaaaggtgatattactttccatattgctgggtgcagacacccctttatgatatggttcataatatccaagttggagagggtgatattacttcccatatcatgggaggtatacccttccctgtgatatggttcgtaatatccagaaggggagagattgatattactccccatattgtggggggcgtacaccttcctgtgatacggtttgtaatatctaggggatatagtgggtgatattactcaccatatcacgggggttgtaacatggtttgtaatatccaggggaggagagggtaatgttactccccatatctcggggcatgtacaccctcctgtgacatggttcgtaatatccaggtcgggagagggtgatattactcctcatattgccgggggtgtgttatggttcataatatcctggggaaggaggctgctatcactctccacatcttgggggatgtacactctcctgtgatatggttcataatatccagggtgggtgagggtaatattactccccatatcgcgggaagtgtacatacccctgtaatattgtttgtaatagaagagagggtgatattactccccacatcgcgggtggtgcccacccccctgtgatatggtttggaatatccagggggatgaggagggtgatattactccccatatctcggtgggagtacatccctctttgatcaagttcataatatccaaaaggaaacaggagagtgatattactccccatatcgccgggggtgtacacgggagggggagtacacccccggcgatatggtctgtaatatccagggaaggagaggagggtgatattactcaccatatcgcaggtggtctacatttacctgtgaaacagtttgtaatatccagggggggaaatgagaatgattttttttttttgagtctcactgtgtcacccaggttggagtgcagtggcacgatcttggctcactgcaacccccgcctcctggactcaagcaattctcctctcccagcctcctgaatagctgggactacaggcgcaccccacaacgtctggctaatttttgtatttttattagagacggggtttcaccatattggccaggctgatctcgaactcctgaccctgtgatccatccgcctcggcctccaaaagtgctgagattacagatgtgagccaccacgcatggcccaaggagaacgatattactccccatatcccagggggtgtatatccccctgtgatatggttcagaatatccggaaggaaagacagggatattacttcccatatcgcaaggggtgtgacatggttcgtaatatcccatgggggagagggtaatattactcttcgtattgtgaagggcatacactcccctgtgatacagttcataatattccggggagtagaggaagatattatgctccatatcgcgggtggcataagccccctgtggtttggttcataatatccagggaggagagggtaatattactccccatattgtggggacgtacaccctcctgtgatatggtttgtaatatcccagaggggagagagtgatattactccccatattgcagggacatacacccccctgtgatatggttcaaaatgtcttttttttttgaaggactggttctttatttcaaaaagacacttgtcaatattcattatcaaaacagttgcactattgatttctctttctcccaatcggccccaagtagaccacatcaaaggagagtacatattaagccaataagctgtaggatgtacacctaacagacctcctagaaaccttaccagaaaatggggacagggtagggaaagaaactttaaaagatcaacaaactgccagcccacggactgcaggggctgtcacagccagatggggtggccagggtgccacaaacccaaagaagcaaagtttcaaaataatataaaatttaaaaagttttgtacataagctattcaagatttctccagcactgactgatacaaagcacaatgagatggcacttgtagagacagcagcttcaaactcagaaaagggtaatgagatgagtttcacatggctaaatcagtggcaaaaacacaatcttctttctttctttctttctttcaaggaggcaagaaaagcaattaagtgctcacctcaacataaggggaacatgatccattctgtaagcagttgggagggggtagagatggaacaaaattttggtctcagaggtcttgccatcttaatttggtcacttctaatgaaaaaaataaaaaatagaaataacattatccaaaggtatcttaaagctgaaaacttgaacagcacattttttgttgttgttgtttggctaactcctcctggaaccacctttctggcttagctagtactttgtacagagcaatgaggcttcccatagtggagtctccctgggctctgtttggctctcagcaaggcaggcctataccttttcctctcctccatggagagaggaatatgcattaaggtgaaaaatcaccttccaaaagtgagaaagggattcgatcgctgcttcagggctgtggtattatatggaatgttttacaaaaggttgctacaaaacaacaaaagaggtaattacaaaatgtgtacatcacaacatactttttaaagacattatgcattgtgctcacattcccttaaatgttgtttccaaaggtgctcagcctctagcccagctggaatctccgggaagaggcggacagtttggtgaaaaagacacagggaaggagcgggcggcggaaggagggggcggcgaaaggagaaagcagccttccagttaaagatcagccctcaattaaaggtcagcttcgggcaggctggcctcaggcggagtctggttcagagggaggagcagcagcagggtgagactgaggcgttctacatctcattcaggtcaagcagagtctggtccagcatcctttgtgtacagaggtgctcccctttggtgcatttcagtttatcttccaagtcatcaattgtcttttccagcttggctaccgatctctcagcaaactcagcatgggtctccgcctcctttattttatcagtaagaatcttgatctcttcctcatatttgtcttctttttgagagtacttttcttcagcagcactcagacacttcaggttctggtccatcagtctaatctgctcatccatctctcggcaaagggattctgccagctcagctcgttcctctgtgcgttccaagtctccttcaatgatcaccaacttacgagccacctcttcatacttcctatctgcctcttctgcaatgtgcttagcttctctgagttggatttcctggagttccatcttttcttcatcttttaaggcccggttttcaataaccttcttacctctctcactctcatcagcagctttttccgcttcttccagcttttgcagggcagtagccaggtgctcctgagcacggtccagctcctcttcaaccagctggatcccacgttcaaggaggccacctcagcctcagcctgttcccgggcccacctttctccctcaacttctcgctggaggcgctcagctcgctcctctgcatcatctgcctgctgctgcagaacctggatcttgcgcttcaccgcctcgatggtggtgatcccagccatggtgcccacccagctactgctagagctccggttcctgcctcctccgatcggcgttgcagcctcctctcacccttacttccgcctcggttcaaaatatcttaagggaaggagttgatattactccccacatcacgggaagtttacatcccctggtgatatggtttgtaatatcccagggtggatagggtgatattactctccatatcgcgaaggagtactcccccctgtgatatggttcataatatccttggggggagagtgtgatattactccccatatcgcgagggccatatactcctttgtgacatggttcgaaatatcccggtgggggagggggtagagggtaatattactccccatacagcgaagagcatacgcccttctgtggcaaggttagtaatacttcagggaaaagagtgcaatattacttttcatattgcagggaacatacactcccctgtgacatggttcgtaatatcccgggggctgagagggtgatatttctccccatatcaccgggggcctacacctgggtgtgatatggctcataatatacagggagggagagggtgatattactccacataccgagtgaggggttacacaccctcgtgacatgttcgaaataccccaaggaggagacaatgatattactttccctgtcgcgggggctacaccctcccagtgatatggttcacaatatcccggggtggagagggtgatattactccctatatcaccggggggtgtacacttccctgggaaatggtttacagtatccccggggggagagggtactattactccccatatcacgttacatatcagggtacacccccacgtgatatggtttgtaacatcccaggaggaagaaaatgatattactccccatatcgcggtggcatacacccctccccgttaaatggttcataatatcttggggtggagagggtgatattactccccatatcacgtggggcatacaccccactatgatatggttcataatatcccggaggggagagggagatattactctccatgtcgcggggggcatatacacccctgtgatatggtttgtgatatcccgggggcggagagggagatattactctccatatcgtggggtcgtacacttttctgtgatatgattcgtaatatccagacggggagagggtgatattacttcccatattgcgggggcgtacacccctctgtgatatggttcataatatcccgaagaaaagagggtgatattactcctcatatcgcggggaacacacaccaccctgtgatatggtttgtaatattcagcgggggagagagtaatattactccctgtatctcggatggcgtacactcccctgtgatatggttcataatatccagaagaaaagagggtgatattactccccatattccagggaatgtacaccaccctttgaatatggttcgtaatatccaggaggggagagggtaatattgctcccaatatcgaaggaggtgttatacggttagtaatatccagagaaggagagggtgacattactccccacatcgtggtgggtgtgcacccacctgtgatatggttcataatattcaggttaagagaggtgatattgctttccatatcgccaagggtgtacactcccgtgaaatacagttcgtaatatccaaaaggggagagggtgatattactcccatatcgtggggggtgtacacccctctgtgatatggttcataatatccagggtggaataaggtggtattactccctgtatctcggggcatgtacatcgcctgtgatatgattcataatatccagaagaagagagggtgatattaatctccatattgctgggggtgtacaaccccctgttgtatggtttgttacactgagttggggagagggttacattactctcaatatcgagtggggcatacacacttatgtgatatggttcataatatcccagggaggagagggtgatattactccccatatcgcgggaggcatacaccccaatgtgatatggtttgtaatatctacatttttttttttgagacgaagtctcgctcttgtcccccaggctggagtatgatggccggatctcggctcactgcaacctcagcctcccgggttcaagcgattctcctgccttggtcccccaagaagttgggattacaggcgcacaccaccacgcccggctactttttgtatttttagtagagaaggggtttcaccatgttggccaggctggtctagaactcctgacctcagatgatccacctgcctcggcctcccaaagtgctgggattacaggcgtgagccactgcacctggcctggtttgtaatatctatgaagggggaaggtgatattactttccatatcacgggaggcgtacaccacgatgtgatatggtttgtaatatccagggggtatactgggtgatattactccccatatcgcggggagtgtatacccttttgtgatatggttcctaatattaagctgaggagaaggtaatattactccccatatcgcaggggtttttatatggttcataatattcaggaagagagagggtgacattactctccatatcacggggtgtgtactcccccatgtgatatggtttgtaatatccagggaaggagaggttaatattactccccatatcgcagggggtgtacacctctctgtggtttgtaatatccaaagggaagaggatgatattatcttcaatatcttggggggatacagtccccagtgatattgttcataatatccagagggggaggggatgatattactcccaatattgcaggtggtgtacaaccccctgtgatattctttataatatagagggggatgatgatattactcccaatatagtaaacaacctgtgtgtacaccccctgtgatattgtttataatatccaagggtggaaaggatgatattactcctcatatcgcagggggtgtatacccctctgtgacattgttcctaatattcaggggaggagaagatgatactactcctcatatcacaggggatgtacacccccctgtgatacttttggtaatatccaggggaggagaaaattatattattccccatgtcacagagggtgtacaccccgctgtgatagtgttcataatatccaggtgaaaagaggatgatattactccgaatatctcaggaagtgtacacccttctgtgatattgttcataatatccaaaggtggagaggaggatactactccccatatcgcagtgggtgtacacccccctgtgatatggttcataatatccaatgtaggagaggatgatattactttccatatcgcggagagtgtacatccccctgttatattgtttgtaatattcagggagaaagaggatactactactccccatatcacacggggtgtatattcccctgtgatatggttcctgatatccaagagatattataatcctctcttggattatgctacctctcatatcgcatggggtgtacacacactttgtgatatcgtttgtcatatccaaggagggagaggattatattaatcccaagatcacggggggtgtacaccctcctgtgatattgtttgtaatattaaggggggagaggataatattactcccaatataattaacaccctgtgtgtactcctccttgtaatattgttcataatatccaatgggggagacgatgatattactttcaatatcgcagaggatgtacatccctttgtaacaatgtttgtaatataaaaggcaagagaggatgatactacttccaaaattgcaggacatgtacaccccccggtgatattgttcctaatatccagtggggaagaggatgatagtagtcccaatatcgcaaagggtgtacacaccccctgggatattgttcctaatataaaaggaggagaggatgctattattcccaatatcacagaaggtgtaaaatcccctgtgatattgttcgtaatattcaggaggggagaggattatattactcccaatatcacagggtgtgtacacagggaggggcaagggccagaagcgggcgggaatccccatgtttgggcggacccagtttctaatggccagcatttgccaatcaaagcttaccagagaactctaaaagccagggctttcctgctagacaagactcatttctggaactgctttaaaaagaaacaaaacttcccaaggaccccttttcctctctgtctgcctaaaataatgttttaaaaactcctaaagcagctgaattcagcccccttcctgggggaatgtatagacggaactcccacctttcccggcatcccaaggccagagtatgtgaaactcctgggtctctatgtgtgtctgagcggctgctctgccaacactccacacagccctgtgtcctggacccaaggcccttatgacctgagctcaagaggggatctcctgatccatgggttgcaaagatccatgggagaagcatggtttctggggcggggtcacacgctcagtcactgtttccctcggatgccggagatggttcctttggctctctgccaatacagggtgaatcatcatccatccctcttttctttgttctcccgggtcaagttgtttgcctagtcagtcccaatgtgagaacctgaatatttcagttgacgcgctgacttcaaaatccccgggcttcgggaggcggagcttgcagtgagccgagatcccgccactgcactccagcctgggcgacagagcgagactccgtctcaaaaaaaaaaaaaaaaaaaaaaaaaaaaaagtccccgggcttttcttttcactcagtggaaggcagctgcttctaattggccatcttggcccgcccccaccacgtgaccttctgtaaaatgcctccactctccaggaacgctctcattatataactttgcctgaaaccaacagcacgctcattgcacatatcatgggctcatttatttcacttataaagaacctggccaaggaagagatagtgcctaaagtggccagtattctgaccgatatgttagaaaaatggtgtgccgaccaattcatgacatgtgtcccaaaactagcaacggaaattgtattcgccgtgttgaggtctctaatccagatgatgctcatctatgtactggaaaaggcagagtcctttcctgacaagctgctgaaactcttcagaaacatctcatatttcctgaagaagatgatgtctggacaagcagcacaggtcgttcagatttaactttctattcatatatccagcacgatattcgcacaattgtcacgaaaccttaccagttgatgagtcctgcacatttcctttaatttcaggaggaagagggtaatccggatgagttttctgacctactctgctgctgtgattaaacaaccaccaggaaattttgacgacactgttctcctgagctcctccctttcctccgggaacaaaacaattgaatttacaaaaataaagtgttatttgactggagtgaggtctcatgtctgcttatgcggtggctcgctgctcagaacagggtgagtctctgggttgtgtgctgaggaggggaggctctcaatctggagaaaacccactgcaggggacacctccatggggtctgagggactgaggatgaggagccggactgggtctagggaaggaggaggtttcagagggtgaaattctggcactaaagcctgggggtgtttgggaacttcctccttccgaagaagtttcagggagggataaagacaaaccctgggctccttgaggggcccttactaatttgagaggactctatcgggaaggagagtgacaatggcctccttgaggactgaggcccctgaataaatgaggcccagatacagtccatgggggatgagaccttcaagggtcacattttggttgggacagaggaaaagtgcagctctgcagccgcagaggaaaacccggcagtgtgaaagcgaccttggaggggccctgtgcgctctgaatgcgtctgagcccccatcccctgtccccgcctctctttctggattcttccagctcggctgtctccgccatcttctgagcgctccaccctgacttattcaagtttcccttctgccttccaagtactccaaaatctttcagatctgtgtccctacccctgtttttagcatgtgttggggctccaggtccctgaaggtttctggcctgaaatccacctccccagcggagtggactgcgttctagagactccacactccgcgaggttcccaggcccctgagggacaaccgagtggcctgcgcacttcagggctccacactcggcaaggtctttcaagcccttggggtccccttcttagttttttccacctttctgggctgcagtcactccataaatgctgggatctgatccccacccccactctcgtttcctcaattctgcgggctacacgctctggcaaggtcctccgggccctggatcccctccctctccctatgcccacgctcctagtcagcccttctggggtccactattttcaggaactaaccgttctcatggagccttgctaaccggaaagctgtgtggaagaaaggctttgaggatagaggtggagatttggctcttccatagtgccactcacccaccccaccatgctgccactgccagacccggacccctgtttcagaacaagtgaccagattcgctcctggacagccctggacactggccttttctctgaaaactactcaccctttctctagtccccacttcatgccagcctcataccctcttccttcccccacgctggcttccgggatcctcctctgctcagacaacctcttctgtgtcccacccccgtttttagaatgctttggggcaccaggttgggggaaggtttctggcctgatatccatctctttccaaactcccttcttcccttgaaaggcttcttgccttcagccccacttctggctccgaggtttcaggacaccctcctcttcatcctcattcttttgaccaccagctttttaggaattcgaacgtccctctcatcttcgtgaatcctgtccaggcatttgttgaccccttcatctgatacccctgacctcacattgccaaaagtctacccctacccagtacactggaattagacaaaatcccaggagttttacctcaactctgagtgtgcccacaggagctctccctgaagccacgtccttttaagcagggtctagggttcctcccttgtcttaatgaactctttgtcacacggaggacgttatggagcccttatgatctttcactgcctttctgcccagcgttttgtctttccatggacatttataatattttccatggacattttgttctctcaatgtccacccctaatttccaacatcccaaagattctcatgtgtttcctgaaagccatttacaggaatggctgtgcccagacccccttccccaggatcctccttcacacctggtaggtgcctctcctagagagatttgcactcagttgtcgtgcagtcacatggcccagatggttgttaatcacccccttcctggcaacagctagcagccagggaatcactggcacagaaacctcagggtgaccaagatgaggccacctctgtgctgaaggctgtgctccagagcctgcttgggatcaggcttaagcaggtcttcagccagacctgatgttacctggtttccttgagctgccctgcctgagctatcgggagcactccctcaatgcacatcttgattccctatctcatgctctgcttctagaaaccatgagctatcaattgctactggcaatggtcctgggaagtcaaccctaagtatggattctggggttggatgactccccacaggacttcagtgagcaacaatcactgctggcagttggaggacagagtcgctagggcatgtgaccactgtgaaaccaccgatgtttcacctggggtaattttggatgaactacggtagaagcactgaaggtacattgcttttggtttggaagattgtaggtaaataatagcgatatgaatgtggaattggatggctgcaaacgagtgccattgatgcattgaaagaggaaaagtcaggctgtcacctgtcactcagcaatttaaagtgtgagagttgggactagatgtggtggctcacatctataatccagagattcgggggaagcttgaagaggtaggatcttttgagtccaggagttccagaccagcctggacaccagagcaagacctcatctctacaacaaaattttcttaaaaattagatgggcttggtggcacgcacctgtacttgtagatctagctaatggggagcatgagataaaaaaatcacctgagtcagggacttaggggttacaatgaggtatgattgtgccagtgcacacactcccacctggccaacagagtgagattctgcttccaaaaaaataagaaataaatcaggtttgagagttggaaagcatcatcttctcctagagccaaaggacatgtacaactgagacccaggaacaaagcttcatcacaaagagaccatcatcagtggagccgggagatgcattccccctcaccctgccttgaggaggcagtggagtcatctgtctgggatcctttctgacccagccctatttgtttgtctctttggcttctttggatttgtatattttagctgttataacactgtaaaacaaacagagtgatttttttgagttgtgtgaatgatgctagctccatagtcaccctgagagtgatgggaacttttgaatttgtggcaagttggagggtagtgtaagtgacctgagattgccaaattggggctagcactggatgtgaggttaggctagtggaaaaatatgcccagaaccagaggagtgtgggctcactgcaggtggttaggctcagatccaaattgtacagatggatagctttggggtaaagaataacatagttgagaagtgcatgtgttagtctgttcatgcactgctataaagaattacctgagactgggtaattatttataaaactcaggtttaattgggtcatggttccacaggctgtacaaaaagtatgatgctggccatcagctcaacttctggggaggccccagaatagttagagtcatggcaaaaagtacaagggaagcaggctcatcttccacggccagagctggagcaagtggtaggagaggtgatacacactttcaaacaagtaggtcttttgagaactccatcaccggacagcacctatgggatggtgctaaattattcatgaaatatccgcctccataatccactcaactgtcaccagcgcagccagccccacctccaacagtggggattacaattccatatgaggtgtgggtggggacacagctccaacctcaatcagtgggcatcctggattgggtctactatagaaggagaaccaggagctgactatgatcttgaaccctacccatgatggccgggcggggtgactcatgcctgtaaccccagcactttgggaggctgaggtgggtggatcgcctgaagtcaggagttagagaccagcctggccaacatggtgaaaacctgtctctactaaaaatacaaaaaattagaccggcgttgtgctggatgcctgtaatcacaccactacgctccagcatgggaaaaaataccaaaacttcgtctcaaaaaaaaaaaaaaaaaaaaaaaaaaaaagactgcccatgaccactgcaccagtgagagggacaccagcatcactgagatgcaagggctggacattcttcataggtcagagctcaaagcaggggacactgatacagagatgggctccatccatagcaccaaagtggtgagaggatgtgggaatggcagaggccagcactttgccatcaatgcaagggggtataaggaggtgacaccagtgccagagtacatcacggggggactgccctacaatatctaggacttacctcttagagcgtgtttcattagcgacaacagatataaatggcagacaggtgtgtccctgcattaacaggaaatagaaatcatcaagaggaacagaaggcagatgtcagcagccccttagaaagtcatcatccttcatacagttaaaatctgagacagttctcacacgagaaggcctaactcaaaaagaggctgggttctcatgaggcaggtttatgcaaaaccaaggaaggtgtacaagtttggaattctccagtttcccttggaaaagacctacagtcatttgcttaggtaactgagcactgaacaaaggtgagtattgttgtcttttagaagctcttggccaagaaggccttgttggcataaaacccatggtttggaaacatcaccatgacccctgttagagtaatggcctaagggtgggggtcaggaaattgatgtattccttgccaacttctgcctctaagtgagtgaactctgtttgtgaacctctctcctctgtggttatgttcctaggctctcatgtataatcaggagtcatagacttagaaacaggaaaaatacttacagtgtttttgtggcctgtgagctatgacttataattttaggaaaaaaacaattgcaaatggaaagcctaagtctatcaatgctcatccaagacaacataatcaataaaaaccaatatcaaatctcaaggcaaattatttcctgtatatagatggcagagatgagcaccaccatcaaaaactcaaggaccagtgctgtgggtccagtcatctgtttcatggaattcaccagtctggtatcttcaaaatccagaaggatgatggcagatggcaggaaagtaatgcaaacgtcatcaggtgtgaccccactgtagcagctgtgatggatgttttctctcaccatagcaataaataacacaacctcggtcacactgtatgcattgttggtctgcaaaatccatgttttgcaaaactcttcaggaaggtggatctgtaatattggcattgacatgagaacaacagcagtatttattcacaatctcaagctctctgtcttcccgtctctctcattagccatccaagtagtcctgaggaaccaagcccatcagaacattctgcaacataatacacagctccattctccattcaaattttgttgttgttgttgttgttgatgagacaacatcttactccatcagccaggctgacgtacagtggggctatctgggctgactgtagtcttgagcttccaggctcaaggcatcctctcacctcagcctcctaagtggcttgaactacagacacacagcgacatgctgggctagtttttgtatattttgtagagacgtgctctcaccatgttattcaggctggactcaaactcctgagcgtaagtgatccaagcaccttggcctcaaagtgctgagattacaagcctgagccactgcacccagcccaatctccattctactgataacaatgtcattaccaggtctgatggacaggaaatggtaaggtttctgaaaacctaaggatcacacagcgagttccaaaggctgaaagtgcatacctgtcgacactgataccaatgacatccaatggtgagaatgacattccttgtagtcctagctctgctcataacaaatctatactgaagtgtaagagtttgatggtcatggggattttccatgtctctgcctttcagcgatgtgccatatctgtgaagtgttcagaaatgcaacagcctgaggcatgctgggcatatcctctaataaaaaggaaaatgccattttatggtcctgtatttctacaagttggaacacatgggcctgtgatccagatgggggaaatgggaatattcccactcattcaccttcatccacgaagcccatttgaaagctttgggcttcccatccttgtagattttagtgttgtgggctgggtgcagtggctttcacctgtactgccaacactttgggaggcctagacaggtgaatccactgaggccaaaagttcgagaccagcctggccaagatggtgaaaccccgtccctactaaaaatacaaaaattagcaaggtattggggccagcacctgtaatcccagctgctcgggaggctgaggctggagaatcgcttgaacccaaaaggcagagactgcagtgacccgatcctgcctttgcactccacctgggcaagcagaacaaaacttctgtcttgaaaaaaaaaacaaaaaacgaacaaaaaagatgttagagttctgggtttagaggtctataccccagaaagagaatggtttcaacaagggacaaagaagttgctttaaacgttgacttgccatttcttttcagtgtgtttgttctcttgcgtcaagagaccaccagaaaagtggtgcaattactctcctgtcaagaatcattgactatcatctgcaagagggtcagatcctggtatataattagggcagaaatacttagtctgagaagggtatgacatccagaggccctattaatgatgtccttttctccatgcctgactctgaccccatgtgctggactgcccctgtgtggatggcctcatggcctgctcggactctgaggtcccaccccaagtggcacctccatggagggctctactcttgtatgggctctgacactcacactgagacactctcccatggacacctcttcacccacttggggtctgaaactgggctactccatccctccctaacctggaacagagagctttcactgctattacacaagtcatagaggctaactcctcatttttccaagctaattattgaaacattagtcctgggttgataagacaagataagttaacttttcataaatttgcttatcaagttttgaataaattcaaataaattcaccttccccacacaccttagttgtcgacatcacacgcgcacccatactcacagggtgagcacgaaggcttcactgtcagtggagaaagtggcaaaacccttctgtgcctcatcctggtctagacctggccctcatcctttcccactcttcccctcactcccttggattcatccacactggcctcctgcctgctgctccacctccctgcgaagctcacccctgcctcagggcctttgcacgtgcagtggcttcaagccatatcctcttcacccagatctcccagatctcctgaatgatcttcttttatcattcaggtctcagcttgcatgtaatcttctcagtgaggattacccaaaccacatagttcattcattcattcaaatattcattcaatggcatattgacaaagcagctacttcatgccaggccttgggccaggtgttatggatatggcaacaaacaaaacaagagttttctgctctcaaatttttacccacttaaaggagatatcatacatcatctgtaaataaatacatcatctgtaaataatgatgtaaataaatacatcatctgtaaatctgtaaataatgatgtaaataaatacatcatctgtaaataaataaagtataataaaagaaaatagtaggtttttttggttggaggtgaccgtgaagtttgcaaataccatcttacaacacattattttattttatttcatttcatttttaattttattattattatactttaagttttagggtacatgtgcacaacgtgcagatttgttacatatgtatacatgtgtgaagttggtgtgctgcacccattaactcgtcatttagcattaggtatatctcctaatgctatccttcccccctcccccaccccacaacagtccccggtgtgtgatgttccccttcctgtgtccatgtgttctcattgttcagttcccccctatgagtgagaacatgcggtatttggttttttgtccttgtgatagtttgctgagaatgatggtttccagcttcatccatgtccctacaaaggacacgaactcatcattttttatggctgcatagtattccatggtgtatatgtgccacattttcttcatccagtctatcattgttggatatttgggttggttccaagtctttgctattgtgaagagtgccgcaataaacatacgtgtgcgtgtgtctttatagcagcatgatttataatcctttgggtatatacccagtaatgggatggctgggtcaaatggtatttctagctctagatcactgaggaatcgccacactgacttccacagtggttgaactagtttacagtcccaccaacagtgtaaaagtgttcctatttctccacatcctctccagcacctgttgtttcctgactttttaatgatcgccattctaactggtgtgagatggtatctcactgtggctttgatttgcatttctctgatggccagtgatgatgagcatttcttcatgtgttttttggctgcataaatgtcttcttttgagaaatgtctgttcatatccttcacccactttttgatggggttgtttgtttttttcttgtaaatttgtttgagttcattgtagattctggatattagccctttgtcagatgagtaggttgtgaaaattttctcccattctgcaggttacctgttcactctgatggtagtttcttttgctgtgcagaagctctttagtttaattagatcccatttgtcaattttggcttttgttgccattgcttttggtgttttagacatgaagtccttgcccgtgcctatgacctgaatggaaatgcctgggttttcttctagggtttttatggtttgaggtctaacatgtaagtctttaatccatcttgaattaatttttgtataaggtgtaaggaagggatccagtttcacctttctacatatggctagcctgttttcccagaaccatttattaaatagggaatcctttccccacttcttgtttttgtcaggtgtgtcaaagatcagatagttgtagatatgtgacattatttctgaggactctgttctgttgcattggtctatatctctgttttggtaccagtaccatgctgttttggttactgtagccttgtagtatagtttgaagtcaggtagcatgatgcctccagctttgctcttttggcttaggattgactttgcaatgcggggtcttttttggttccatgtgaactttaaagtagttttttccaattctgtgaagaaagtcattggtagcttgatggggatggcattgaatctataaattaccttgggcagtatggccattttcacgatattgattcttcctacccatgagcatggaatgttcttccatttgtttgtatcctcttttatttcattgagcagtggttttagttctccttgaagaggtccttcacatcccttgtaagttgggttcctaggtattttattccctttgaagcaattgtgaatgggagttcactcatgatttggctctctgtttgtctgttattggtgtataagaatgcttgtgatttttgtacattgattttgtatcctgagactttgctgaagttgcttatcagcttaaggagattttgggctgagacaatgggttttctagatatacaatcatgtcgtctgcaaacagggacaatttgacttcctcttttcctaattgaataccctttatttccttctcctgcctaattgccctggccagaacttccaacactatgttgaataggagtggtgagagagggcatccctgtcttgtgccagttttcaaagggaatgcttccagtttttgcccattcagtatgatattggctgtgggtttgtcatagatagctcttattattttgagatatgtcccatcaatacctaattattgagagttttcagcatgaagggttgttgaattttgtcaaaggccttttctgcatctattgagataatcatgtggtttttgtctttgggtctgtttatatgctggattacatttattgatttgcatatattgaaccagccttgcatcccagggatgaagcccacttgatcatggtggataagctttttgatgtgctgctggattcggtttgccagtattttactgaggacttttgcatcaatgttcatcaaggatattggtctaaaattctcttttttggttgtgtctctgcctggctttggtatcaggatgatgctggcctcataaaatgagttagggaggattccctctttttctattgattggaatagtttcaggaggaatggtaccagttcctccttgtacctctggtagaattgggctgtgaatccatctggtcctggactgtttttggttggtaagctattgattattgccacaatttcagatcctgttattgctctattcagagattcaacttcttcctggtttagtcttgggaaggtgtatgtgtccaggaatttatccatttcttctagattttctagtttatttgcgtagaggtgtttgtagtattctctgatggtagtttgtatttctgtgggatcagtggtgatatcacctttatcattttttattgcatctatttgattcttctctctttttttctttattagtcttgctaccggtctatcaattttgttgatccttttaaaaaaccagctcctggattcattaattttttgaagggttttttgtgtctctatttccttcagttctgctctgattttagttatttcttgccttctgctagcttttgaatgtgtttgctcttgcttttctagttcttttaattgtgatgttagggtgtcaattttggatctttcctgctttctcttgtgggcatttagtgttataaatttccctctacacactgctttgaatgtgtcccagagattgtggtatgttgtgtcttttttctcgttggtttcaaagaacatctttatttctgccttcattttgttatgtacccagtagtcattcaggagcaggttgttcagtttccatgtagttgagcggttttgagtgagtttcttaatcctgagttctagtttgattgcactgtggtctgagagacagtttgttataatttctgttcttttacatttgctgaggagagctttacttccaagtatgtggtcaattttggaataggtgtggtgtgatgctgaaaaaaatgtatattctgttgatttggggtggagagttctgtagatgtctattaggtccgcttggtgcagagctgagttcaaatcctgggtatccttgttaactttctgtctcattgatctgtctaatgttgacagtggggtgttaaagtctcccattattattgtgtgggagtctaagtctctttgtaggtcactcaggacttgctttatgaatctgggtgctcctgtattgggtgcatatatatttaggatagttagctcttcttgttgaattgatccctttaccattatgtaatggccttttttgtctcttacgatatttgttggtttaaagcctgttttatcagagactaggattgcaacacctgcctttttttgttttccattttcttggtagatcttcctccatccctttattttgagcttatgtgtgtctctgcacgtgagatgggtttcctgaatacagcacactgatgggtcttgactctttatccaatttgccagtctgtgtcttttaattggagcatttagcccatttacatttaaggttaatattgttatgtgtgaatttgatcctgtcgttatgatgttagctggttattttgctcattggttgatgcggtttcttcctagccttgatggtctttacaatttggcatgtttttgcagtggctggtactgactgttcctttccatgtttagcgcttccttcaggagctcttttagggcaggtctggtggtgacaaaatccctcagcatttgcttgtctgtaaaggattttatttctccttcacttatgaagcttagtttggctggatatgaaattctgggttgaaaattcttttctttaagaatgttgaatattggcccccactgtcttctggcttctagagtttctgccaagagatcagccgttagtctgatgggcttccctttgtgggtaacccgacctttctctctggctgcccttaacattttttccttcatttcaactttggtgaatctgacaattatgtgtcttggagttgctcttcttgaggagtatctttgtggcattctctgtatttcctgaatttgaatgttggcctgccttgctaggttgcagaagttctcctgggtaatatcctgaagagtgttttccagcttggttccattctccccatcactttcaggtacactaatcaaacgtagatttaatcttttcacatagttccatatttcttggaggctttgtttgtttctttttactctctttcctctaaacttctcttctcacttcatttcattaatttgatcttcattcacttatatactttcttccacttcatcaaatcggctactgaaggtattgcatgcatcatgtagttctcatgccatggttttcagctctatcaggtcatttaaggtcttctgtacattgttttctctacttagccattcgtctaatcttttttcaaggtttttagcttccttgtgatgggtttgaacatcccctttagctcagagatgtttgttattactgaccttctgaagcctgcttctgtcaacttgtcaaagtcattctccatccagctttgttccattgctggtgaggagctgcgatcctttggaggagaagaggtgctctggtttatagaattttcagcttttctgctctggtttctccccatctttgtggttttatctacctttggtctttgataatggtgacctagagatggggttttggtgtggatgtcctttttgttgatgttgatgctgttcctttctgtttgttagttttccttcgaacagtcaggttcctcagctgcaggtctgttggagtttgccggaggtccactccagaccctgtttgcctgggtatcaccagcggaggctgcagaatagcaaatattgcacaacagcaaatattgctgcctgatccttcctctggaagcttcgtctcaaaggggtgcctggctgtatgaggtgtcagttggcccctactgggaggtgtctcccagttaggctagatgggggttagggacccacttgagaaggcagcctgtccattcacagagctcaaacactatgctaggagagccactgctctcttcagtgctgtcagatggggatgtttaagtctgcagaaatttctgctgccttttattcagctatgccctgcccctacagatggagtctacagaggcaggcaggcctcattgagctgcggtgggctcctcccagttcgagcttccagaccactttgtttacctactgaagcctcagaaatggtgaacacccctcccccacccagtctgccgccttgcagttccatctcagactgctgtgctagcagtgagcgaggctccatgggcgtgggacccactgagccaggcacaggatataatctcctggtgtgccatttgctaagaccattggaaaagcacagtattaaggtgggagtgtcccaattttcccagtacagtctgtcacgggttccctcatctaggaaaggtaaatcccctaaccccttgtgcttcccggtgacgcaatgccccaccctgcttcagctagccctccatgggctgcatccactgtccaaccagcccaatgagatgaacaaggtacctcagttggaaatgcagaaatcacccatcttctgtgtggatcaggctgggagctgcagaccggagttgctcctattcggccatcttggaatggcaatctatgtttgctttttacatttgaaaaaactggtgtcacgtacctaggtattaatcattgtggtatcctcttgccgatttacctctttatcattaactagtgaccctccttgtcttttgttgttacagtctgtgattttagtctattttatctaatatgagaatagctactctggcacttttttggtttccagcttcatgaaatatccttttccatttccctgttttcatttccctttcggtgtctctatagatgaagttgatttctttaaggcaccataagttgggtcttatttctttatccatttgaccatttagagaatttagaacactgtcagtgttattattcataagtaaaaacttaagagtgggtgtagtggtgtacatctgtatttcctgcactttgagagactgaggcgagctgatctcctggggtcaggagtttgagaccggcctggtcaacatgatgaaaccctgtctctactaaaaatacaaaaattagccaagcatgctggcatgtgcctgtaatccaatttacttgggaggctgaggcaggagaagcttgaacctgggagacaaatgttgcagtgagctgagatcacacagagaagtcatctccactctcctcatcagaacctcttgttcacagcatttgtgagcacaaatcaatgatggttattctttcctactaattagggatattttattacacagcaatagcctccagcaaagggaaccatcatacatgattcctacaagttgacagggctggaattatcactgaaaaactaaggtggctatacttgattcccaatgtccaatttttcatgaatagagaaatttatcctttttccccccagccagaaaccaagttttgctcttacgcccaggctggaatcaagtggcacaatctcagctcactgcaacctctgccccccagcttcaagaaattcaccttttgaacaaggagatattaaggatacactatgtgtatgctaccggtggttgcaggagactcagaaaagagagaaacagtcactggcctcgtgcaactgatattctcgggaggagagaaaggcaatcaagaaagaaacatgctgtatttcagacagctgtaagtcctccacaagaaaagaaagcaggtgaggaacataggaaatgtgtcaaccataaggttcccgctaattctataagttggtcagggatatcctccaagaataagcagcatctgagcaatcacctgaagggaggaaggaaggaagactgtgagtggtggcttacacctgtaatcccagcactttgggaggccaaggagggcagattgcctgagctcaggagttcacgaccactcagagcaacctgttgatacccaatctctactaaaaacacacaaaaaaattacccgggtgtggtggcacgcacctgtagtcccagcttccatgcccagctgatttctctctctccatatatatatatatatacacatatattgtttttgcagagatagggtctcactgtgtcacccagtcatcaagcaattctcttatactgttttggaaaagcatgggaattacaggtgtgaaataccctgctggtcctgaaaaatgtgatatttgggattctctgcctggcttgttttacccaaaataatgacctccagttccttccaggttgctgcaaaagacatgattttcactgttttataactgaatagtattcctgtatgtatacataccacattttctttatttattcttctgttgattgacatgtagggtgattccatgtctttgctactgtaaataatgctgcagcaaatatttgtgtgcattttgatctattcctttgagtaggtacccagtactgcaactgcaggactgagtagttgttatattttttgttctttcagaaatctccatagtgtttgccataaaatctgcactaatttacattcccaacaacaatgcataagatttccccttttctccacattctcactaacatttgttatgtttttgtctttttcataatacccattctgactggagtaagatatctcattgtggtggttgttgatatttttgagacggggtctcactctgttgccagactggagtgcagtggtgtgatcgtggcttgctgcaacctccacctcccgggttcaagcaattctcctgcctcagcctcccgagtagctgggactacaggcgcgtgccaacaggcctggctcattttttgtatttttagtaaagacagggtttcaccatgttggccaggatgatcacagtctcttgagctcatcatacacctgcctcagcctcccaaagtgttggaattacagtcatgaggcagcgcacccaacctcaatgtggttttaatgaccatttctctgacgattcatggtgtggagaatttctttgaaataccttttggccatttatatgtgctcttttaaaaactgactcctgtccaggtgcggttgagcatgcctgtaaccccagaacttcgggaggctgaggccaatggatcacttgaggcaaagaggcagaaatcagcctggccaacaaggcaaaaccccatctttactaaaaatacaaaaaatcagccacgggctgtgactcgtgcctgtggtgcaagttactcaggaggttaaggcacaggaattgcttgaacccggtaggcacaggtcacagtgagccaagatcatggcactgcactacagcatgggtaatagagaaagacctgtctcataaaaacaaatgaataaataaataagataaaaaataaaaaagtctctttatgtcctttgccgactttttaatgggattctttggagttttctgttgtagttgagatctttgtttactctcggtattagtcttttgtcaaaggaaaagtttacaaataatttcttccgttctgcagtttgtctgctcactctgttgagaggattatttctttggctgtgcagcagctttttgtttcagtaaagcttttgaatttatataattaaaattttcagtttggtttaaatttgcactggtcgatttttggttttgttgcctgtacttttgaagtcatactcttgaactctttactagacaataaccagaagagttttctctagttttcttctcacatttttattatttcagtacatatatttaagtctataattcatcttcaattgatttttgtagaaatagtgagaaataggagtccaggtttattcttctgcaaatgacaattcaattgttccagcaccaattattgaaaagggtgtgctttcctcaacgtatattcttatcagctttgtcaaagatcagttggctataaatgtgtggctttctttctgggctctctagtctgttacatcaatctgtgtgtctatctgtatactactaccatgctgtattggtgatgatggctttgtaatataatttgaagtcaagaaatgtgatgctcccagctttgtttatttgcttcagaaaggctgagtcaacagctgcagagatgaagctgcccctcctcgcagggctccttcccggaaaaagatcatggctcccactgaccatataaccatggctggaactcctgaaattcccaaagggaggccctacccagtgaggggggatgaatgaaggtcctacttaaggaatctgtctggccacaatcaggcacagcagctgtgctgccttgtgggggaccagaccacctggattccctggagcctgcaggctagaatgtctgagtccatggaaacacagaaatggaggccgccctcacctccccagaaaactgtagtctcaggcagtctccagccgattgccactggttggctgctattccaagccagtgggtcttaacttgagaggtgctgtggaagtggggcccacggaatgaggctgcttggctccctggattcagccccttttctaagggaatgtacagatggaactcccgccttgcccagctttccaagtatataaaactcctgagtctctgtgagtgtctgagcgagtgctctggcaacattcgacacggctctgtgtatctgacccaagacccttatggcatgagctaatgggaggatcttctgatccatgcgtggcaaagatgcatgggagaaacatggtttgtgggtaggggttgtgcattcactactgcttctcttggctgtaggtgaaggtttctttggctctgtgctgatactgggtgcaccatcacccaccccctttgtttcttctcctgggtcaagtcatttgcctaatcagtcccaatgtaggaacctggatacttcagttcaaggtgctgaattcaccgtgcttttcattcaggggaagacagctgcttctcattgggcatcttggcctgcccacttcacgtcactttttgtaaaatccacaccactccaggaatatccattacttaacttcgcctgaaataaacagaaggctcattacacttatcatgggctcacttacttcgcctataatgaaggtgccatggaaatgctagtggatgacgtggtccattttcttagggatgagatagaaaaatggtgtatggctttttaatttaattaaaatttttagtttggtttaaatttacattggtctctttttggttttgttgcctgtacttttgaagtcttactcgtgaactctttactggacaatgaccagaagagttttccctaagtttcttctgatattttgaccatttcagtacatacatttcagtctataattcactttaaattgatttttgtaaacatggtaagaaataggagttcagatttattcttccgcatatgataatgcaactgtcccagtaccaattattgaaaagggtgtgctttccctagtgtatattcttgtcagctttgtcaaagatcagttgcctatgaatgtgtggctttcattttggattctctcgtctgttacatcaatctgtgtgtccacatttatacctgtaccatgctgtattggtgactatggctgtgtaatatattttagagttaggaaatgtgatgctcccagctttgttcatttgcttcagctgaaaaggttgagtccacaattacaaagatggcagccgcccatccccggaggacctccaacccagaaagagatcaggcttcccaccaaccctataaccctggctggagttcctgaaattccaacagggaggaccttcccagtgaggagggatgaatcaaggtcaaatttaaagaaacagtctggccactatcaggcacagcagcagtgctgccttgtgggggacccctcctgctccagaccagctgccctccctggagcccgaaggctagattgtctgagtctacggaaacagagacggtggccgccccaaccacccagaactcggtagtctcaggcacttggcttgctatcttgccactgcttggctggtattccaagcccgtgggacttgagaagtgctgtgatgatggggaccacaggatgaggctgtctggctccctgtgatatggctgtgatgagtggaggaacaccagggctcatgtctcacacagaattggagaaaatgacacaaacacatgtacagtggttttatggcgtgcagtttaataggcaagaacgaaggaagagctccccatactgagacagagggaggggggctccaaagccaaaagaggaaacccggagtgctgtggataccaatgagttatatgaagaaactggagggggcggtgtctgatttgcatagggttcaggcgattggttcgaccaggcatgtcatttatgtggcccacggaaaaactggccctcccacctagcctttgaatatgcacgtgccggacaccctgatttcctacactcatggggatatatgggggtggccatatcgccaggcacaggtggggacaagggccagaagagggcgggaatcgctatgtttgggtggacccagtttctaatggccggcatctgcagatcaaggttaccggagaactctaaaagccggggctttcctgctagacaagactcatttctggagctgctttaaaaagaaacaaaacttcccaaggaccccttttcctccctgtctgcccaaaataatttcttaacaactcgtataacacctgaattcagcccccttactgggggaatgtaccaacggaactcccacctttcctggtttctcaaggctagattgtgtaaacctcctgggtctcggtctgtgtctgagcagctgctctgccaacactccacacagccctgtgtactaggcccaaggccgccgtgactcagcccatgggaggatctcctgatttcttggttgcaaagatccatgggagaaaaatggtttctggggcggggtcacacactcatggcttctcttggctgtgcaagaaggttcctttggctctgttccaatatagcgtggttcatcacccacccctgttttctttgttctcctgagtcaagttgtttgcctagtcagtcccaatgtgagaacctgaatatttcagttcacgtgcttatcgtgaaattcactgagactttaattcagtggaaggcagcctcttctaattggccatcttggcccgccccctccacgtcacctcccataaaatggccacgctctccagggacgatgccattatatatctttacgtgaaaccgacagaacacttattacactttttgtgagctcatttacttcacttataatgaacatggccatggaaatgctagtggagaaagtggtcgattttctgatggatgtgataaaaaaatggtttgccgaccaattaatgacatatgtctcaaaactagtaacgagacccttaatcgctgggttgaagtttctaatcaagaagatgctcatctatgtattcaacaaagcagcttcccttgcttctgaaatgcttccaaacaacatctcatatttcctgaagaagataatgcctggacaagcagcacaagtcattcaggtttactttcagctcataaatccagcaggatattcgcacaattgttgggaaaccttatcagttcatgagtcgtgcatgtttcctttaatttcaggaggaagagggtaatctggaagagtttcctgacctactctgctgctgtgattaaacaaccaccaggaaattttgatgacactgttctcctgagctcctccctttcctcggggaagaaaagcattgaaactacaaaaataaagtgttatttggctggagtgaggtctcatgtctgcttatgcggtggctcgctgctcagaacagggtgagtctctgagttgtacgctgaggaggggaggctgtcaatctagaaaaaacccattgcatgggacacctccatggggtctggggggctgaggatgaggagctggactggatctagggaaggaggaggtttcagagggtgaaattctggcagtaaatcctgggggtgtttgaaaacttcctccctcagaaggagaagactcagggaggaataaggacaaaccatgggtcccttgaggggcatttactaacttaagaggactttatcgggaagcagagtgacaatggcctccttgaggactgaggcccctggataaatgaggcccagatccagatccagtccatgggagatgagaccttcaagggacatatttttgttgggacagaggaaaagtgcagctctgcagctgcagaggaagccttggcagtgtgaaagcgaccttggagggggccctgtgcgttctgaatgcttctgaggtccatcccctgtccccgcctctttttctggattttttgggctccatggtctccgccatcttctgagcgctccacgctgccaccttcagttttctcttctgggctccaaatactccaaaatctttcatatctgtgcccctacccctgtttttagcatgtgttgggactccaggtccctgaaggtttctggcctgaaatccacctccccagcggtgtggattctgctctagagaccccgcacttggcaaggttcccaggcccctgggggacaaccgagtggtatgtgcacttcagggctccacactcggcaaggtctttcaagcccttggggttccctcctcagttttcttcacatgtctgggatgtagtcactctataaatgccgggatgtgatccccaccccagtgattttttttagttccatgagtgttgctatctgaatagtcatcctgagagtgatgggaccttttgaatttgcagcaagttttagattagtgtgagtggcctgagatcgcaaaactggggctagcattggatgtgaggttaggctggtggaaaaatttgcccagaacctgaggagtgtgggctcactgcaggtggttaggatcagcacagaattgcaaggatgtatagctttggggtaaagaataacatggttcagaagtacatgtattagtcttttcatgcattgctataaagaattacctgagactgggtaattaattataaaaactcaggtttaattggctcatggttccacaggctgtacaaaaaggatgatgctggccatcagctcaacttctggggaggcgtcagaaaacttagagtcatggcaaaaagcacaagggaatcaggctcatcctccatggccagagctggagctagtggtaggagaggtgctgcacacttttgaacaatcagatctttttagaactctatcaccagacagcacctagaggatggtgctaaattattcatgaaatatccacccatatgatccactcaattctcaccggcccaaccaggaccacctccaccattggggattacaattacacatgagatgtgggtggggacacagatccaaactcgatcagtgggcatcttggactgggtctactatagaagaagaaccaggagctgactatcatccttaagactgcccatgatggccaggcagggtggctcatgcctgtaatcccagcactttgggaagccaaggtgggtgaatcccctgaggtcaggagtttgagaccagcctcgccaacatggtgaaaccctgcctctactaaaaacacaaaaaattagatgggtgttgtgccagacgcctgtaatcacagctactccagaggctgaggcatgagaattgcttgaacctgggaggcggaggtggcggtgagccccaatcgcactgctacactccagcatgggcaacaataccaaaacatcgtctcaaaaaaaaaaaaaaaaaaaaaaaaggctgcccatgaccactgccccagtgagagggacaccagcatggctaagatcaagtgctggacattcttcatgggtcagacattaaagcaggccacactgttacagagatgggctccattcatagcaacaaagtggtgagaagatgtgggaatggcagaggccagcactttgccatcaatgcaaggtgggcataaggagctggcaccagtgccagagtgcatcaggggaggactgctttgcaatatctagcacttacctcttagagtatgtttcattagggacaacagatataaatggcagacaagtgagtcccttcagtaacaggaaatagaaatcatcaagaggaacagaaacagatgtcagcagccctcatataaagtcatcatccttcatccagttaaaacctgagacagttctcacataagaaggtctaattcaaaaagagactgggttctcatgaggcaggttcatgcaaaaccaagggaagtatacaactttgggattctccagcttcccttggaaaagacctacaatcatttgcttaggtaactgagcactgaacaaaggtgagtattgttatctttcagaagctgttggccatgaaggtcttgctggcataaaacccatggttggaaacatcaccatgacccctgttagagtaatggcctaagggcaagggtcaggaaattgatgtattccttgccaacttctgcgagacgagtgttggtccactcatctctttcacggaattcaccagtctggtatcttcaaaatccagaaggatgatggcagatggcaggaaactaatgcaaacaccatcagttgtacctccactgtagcagcagtaatggatgttatctcttcattgtaatatccagggagggagaagatgacattattctcaatattctaaacaccctgtgtgtacagcctctgtgatattttttgtaatatccgtgtgggagagaattatattactcctaatatctcaggggttgtgccccctctgtgacaatgttcctaacacccaggaggggataggatgatatcacttttagcatcacagggggtgtacaccccactgtaatattgttcataatatccgggggggagagaatgatattactcccaatatcgcaaagactgtacaccaacctgtgatattatttgtaatatccataagaggaagaataatattactcccaatgtcacaggaagtgtacacccttctgtgatattgttcaaaagatccagttagggaggggatgatattactctcaatatcttaaacaccctgtaggtaagccctctgtgatattcctcataatatccagagggagaggatgatattactcccaatattgcatgaagtctacaccccacctgtgatattgttcctaatatccaggatgggagaggatgatattactcccaatgtcgcaggggatgtacaccttccctgtaatattgttcgtaatatctagaaaaggagaggataatattactttcaacatcgcagggggtgtacaccttccttgttatattgttgctaatatccagggaaaaagaagatgacattaccaccactattgcagaaggtgtacacccccccttgatatagttcctaatatccagaaaaggagaggagatattactccaaatattgcaagaggtgtacattcccctgtaatatttttcctaacattcaggaagaaagagagtgatattgcccttaatattgaagggagtgtgccccccccgtgatattgtttctaatatccaagaaatgaaaggatgatattactcccaatatcacaggggctgtacagccccctcccatgatattgttcccaacatcggggggggggtgaaatagtattattcccagtatcacaataggtgtacacacctgtcgtgatattgttcctaatacccatgggggaaaggacgatattattcttaatatctcagagggatgtacaccctccctgtgatattgttcctaatatccggggtgggagaggatgatattacccccaaaatctcaaagggtgtacacccctcttgtgatattgttcctaatatccagggtggagaggataatattattcccaatatccaggaaaggaaacgatgatgttactgtgaatattccagggggtgtcctcccctctgtgatattgttcctaatatccaggttggggagattatgatatttctccaaatatcacaaggggtgtacaccaaccctgtgttattgttcctaatatcgatggggggagaggacgatattactcccaatatcacagggggtgtacaccacctttatgatattgttcctaatatccatgaagaaagaggatgatattactttcaatatcgcaggggatgtacactccccctgtgatattgttagtaatacctaggagaagaaagtgtgatattactcccaatatcgcaggggatgtacacgcttcctgtgatattgttcctaatatttagggggaaaggggatgatattactcccaatatcgaatggtgtgtacacccccccgtgattctttttttttttttttttttttttttgagatggagtcttgctctgccgcccagactggcgtgcaatggcgcaatctcggctcactgcaacatttgcctcccaggttcgcacgattctcctgcctcagccttcggagtagctgggattataggcagctgtcaccataccaggctaatttttgtatttttagtagagttggggtttcaccatgttggtcaggctggtcttgaattcctgacctcaaataatccacccaccttggcctcccaaagtcctgggattacaggcataactttccctgtgatattcttcctaatattcaggaagaaagaggatgatattgctcccaatatcgcagagagtgtgcactcctcctgtgatatggttcttaatattcagaggaggagaggatgatattactttctatattgcagaaggtgtacacctccctcgtgatgtctttcctaatatccagtgggggagaggttattagtctcaaaatcacagaaggtgtaaacccccatttgatattgttcctaatattcaggggtggggagagaaaggtattactcctagtatttcagggcatgaacacccccaccgtgatatcattcctaatatccagaaggggaggcaatgatatttctcctaatatcacaaagggtgtacaccccttctgtgatattgtaaatattctgtgtgtacacccccctgtgttatagtctgtaatatccgggtgggggagagggtgatatttctccccatattgtaggggatgtacacccttctgtgatatggttcgttatatccagggaagaaaaaggtaatattgctgcccatattgtggagagtgtacacccccatgtaatatggttcgtaatatccaggagtggagagggtgatactgctccttacatcgaggaaggtgtacaccttattgttatatgattcgcaatatccaggggaggagagagtgatattgctccccatgtcgcagggggtgtaaaccctccgtgatatgattggtaatatccaggaaaggaaagggtgatatttctccccatatcgcgggggacgtacatcctcctgtgatatggttcgtaatatccaggaggaaagaggaaaatattgctcttcataacccgaggggtgtacaacccctgtgatatggttcgtaatacccagaagtgtacacccctctgtgatatggtttgtaatatccagggggttagagggtgatattgctccccatatcgcagtgggggtacacccccctggattggttcataatattcatggggggagaaatttacatttatcctcatatcagggggggtgtacaccccccgtgatatggttcgtaatatccaggggaagaaagggtgatattgctccttatatcgcggaaggatcaccctcccctgtgatatggttcataatacccagacgggaagagggtgatattgttcttcataaagcgaagggtgtacagccccctgtgatatggttcataatatgcaaaaggggagagggtgatattgctccccatatcacggagggtgtactcccttctttgatatggttcgtaatatccaggggtgtagatggtgatatagctcgccctattggggagggtgttcacccctctgtgatattgttcgtaatgtccagggaaagagaggatgatattactcccaatatcgcagaaggtttacaccactctgtgatattgttcataatatccagggaaggagaagacgatattactcccaatatggcagggggtgtagaactcctgtgatattgtttgtaatatccaggcaaggagaggatattactctcaatatcgcagaaggtttacacccctatgtgatactgttcatgatatccagggaaaaagaggatattactccctatatcacaaagggtgtacacccctttgtgatattttttgtaatatccaggggagagaggataatattactctcaatatcagaaggggtgaaaaccctcctgtgtcattgttcataatatttagggaaggagagagtgatattactccaaatatcacagtgggtgtacacccccctatgatattgttcctaatttccagaaggggagatatgatattattgccaatatcgcagaaggtgtacaccttactctgacattgtttgtaatatccagatggggaaatgatgatattactcctaatatcacagggggtgtacacccccttgttttattgtttgtaatattcaggggaagagacgattatattactcccaatatcgcagggtgtgtacaacactctatgatattgttcataatatccaggggaggagaggaagtgtacacccccccgtgatattgttcgtaatatccagaggtagagaggatgatattactcccaatattgcaggtggtgtacacctttctgtgatattgtcatgatattaagaaggggagaggatgatattactaacaatatcacaaaaactgtacactccctgtgatattgttcataatatccagaagaagggaggatgatattattctgaatctcgcagaagatatacaccaccctgtgatatggttcataatatcctaggggaaagaggatgacataactgtcaatatcgcagggggtgtacaattccctgtgatattgttcacaatattcagagggaaaaaggataatattactttcaatatcgcaggcggtgtacacattactgtgttattgtttataatatccggaatgagagaaaattttctcccaatatcacaggaggtgtacactcccctgtgatattgttcgtaatatccagggaggggagaggatactattactcccaacatctcagggagtgtaggccccccctttgatattgttcctaatattcggaagtggagaagatgatattacttccaaaatcgcagggggtgtacactccctctgtaatattgtttctaatattcatgagtggaaagaaagatattactcccagtattgcaggggacatacaccacactgtgatcttgttcacaatattcgggggggagaggatgatattactcccaatatcaaagtaggtgtacacccccttctgatattgatcgtaatatccagaattaaagatgataacgttactcccaatattgcagggggtgtacatttttgaatactgttcataatattaagagggggaggggatgatatctgtcccaatatcgcaaagtgtgtacacctcctgtgacattgtcccaaatatccagaggaaaaaaggatgttattactcttaatatctcagagagtgtacacctccctgtgatattgtttgtaacatccagaagaaagaggctgatattactcttaatatcgcagggggtgtacacccccgccccgggatattattcgtaatatccagggggaagtggaatgttcagaatgggagaggatgatattacttgcaatatcatagtgggtgtacaccccactgtgatattgtttgtaatatccgggaaaggagaaaatgacattcctccccatatggcaggggctgtacaccacctatcatattgttcaaaatatccagaaggggagaggatatgtctccaagtatcacagggggtgtacaccccgctgtaatattcttcctaatatccagggtgtgagaggataatagtactcccaatatcccagggcatgtacaccccccttgtgatgttgttcctaaaattcatggggagaaagaatattactcccaatatcacagggggtgtacatacactctgtaatattgttgccaatatgcagcaggagagaggatgatattactcccaatatcacaggggctgtacaccccgctgggatattgtttctaatatcaagggggaaaaaggatgatattactcccaatgtcgcagggtgtgtacttcctctttgtgacattgttcctaatatccaggagagaagagggtgacattccttccaaaactgaaaggggtgtacacaccctttgagatattgtctttaatatccagaacgaaacaggatgatataactcctaatactgcaggggggtacaccctctctgtgatactgtttctaatatccaggaggggaaagaaaaatattaatcccaatatcacagggggtgtacattccccctttaatattgttcctaatatccaggaagacacaggatgatactatttccagcagcacagggcatgtacacccctttgtgatattgttcctaatatccaggaaaagagaggatgatattactgtcaatattgcagggcgtatacactggttctgtgatattgtttctaatatccgggggtggagaaaatgatattactcccaatattccagcgggtgtacacccgttctatgatattgttcctaatatctgggggagagagaatgatattattgtcaatatcacaggggatgtacagattccctgtgatattgtttctaatattcacagggggagaagggtataatactcccgatatcgcagggggtgtacactccccctgtgaagttgttcctaatatccagggattgagagaatgatattactcccaatatcacaggcggtgtaaaccccctgtgtgatattgttcctaacatccagaggaaaagatgatgatattattttcaatatcacagggggtgtacgcatccctgtgatattgtttctaatatccaggggaggagaggatgatattattgttaatatcgcagggggtgtaccccaccctgtgatactgttcctaatatccggggtggaagaggataatattgctcccaatatcgcaaagggtgtacaaccttcctgagatattggtcctaatatccagggagggagaggatgatattactttcaatatcacagggagtttacacaacccctgcgatattgttcctaatatccagcggaagaagagttaggataatactattttcaaaattgctgggtctgtaccccctccccgtgatattgtttctaatatccaggaggggagaaagtaatatgactcccaatatcttagaagatgtacaccctccccataatattatttcttacatccagggggtagaggatgattttgctttcaatatcacagagggagtaaacctttccggtgatattgtttttaatatttaaaaagagagaagataaaattactcccaatacaaaggggatgtattgtgtactcccccctctgatattcttttttaatatccagatggagagaggatgatattactttcaatattgcatgggatgtataaatcccctgtgttattgttctgaatatacaggtggggagagtatgatattactccaaatatcgcagggggttctttccccctgtgatattgttcctaacattcagggagggagaggatgatattactcttaatattgcagggggtgtacccacgcctatgatattgttcctaatatccagagggggagaggatgatctaactcagaatatgacaaggggtgtacacacagcctgtgatatggttcctaatatacaggggagaaggggataatatttctcccaatatcgcagggggtgtacaaccccctgtgatactgttcctaatatacagaaggggacagcatgatattgttcctaatatcgcaggaggtgtacaacgccctgtgatattgttcctaatatccagggcgggagaggatgatattaccctcaatatcgcagggggtgtgcactttccctgttatattgttcctatgatccgggtggggggaaatgacattagtcccaatatcgcaggatgtgtgcaccgctcccccgtgatattgttcctaatatcaagggggagagaggaggatattactcccaatatcgcaagggatgtacatcctccatgcgatattgttcgtaatattcaggaggagagaggatgatattactcttaatatcgcagaaagtggacacccaccctgtgatgttcttcataatatccagggaagcagacgattatatgactttcaatatcgctgggagtgtacatcccttttgggatattgtttctaatatccaggaagggagaggattatattactctcagtattgcaggcagtgtacaccttttttgtgatattgttcctaatattcagaaagggaaaggatgatattactcccaatattgcaggtggtgtatatccccctctgatattgttccttatatcaaggaagagaaagaataatattactcccaatatcaaagacagtgtagacccctcctgtgatattgtatttaatatccatggggaaagaggatgatgttactcccaatatcgcagggggtttacacccacactgtgatattattcctaaaatccagtggaggagaaaataatattgctcccaatattgcagggtgtatacaggccctcccccgttatattgctcctaatatccagcggtggagaggatattactttcaatttgtgtagggagtgtatacccccctgtgatatttttctaatatcaaggatgggaaaggatgacattactcccaatatcgcaggaggtgtacacgccctgtgatattgttcctaatatctagggaaggagaggatgatattactttcaatattgcaggagctgtacaccctctgtggtattgttcttaatatttaggttgggagaaaatgatatgagtccaaatatcgcagaaggcatacacacttccaataacattgttcttaatatccgggggagagggtgatattactcccaaaatctctggggggtgtacacccccttctgatatttttcctaatatccagggaaggaaacgatgatattactataaatattccaaggagtgtacaccttcctaatatcctaatattgttcctaatatccaggggtgggagaggattatattactcccgatatcgcagtgggtgtacacccctcctgtgatattgtttctaatatccaagctaggagaaaatgatatcactctcaataccacagggggtgtacaccttccgcatcatattgttcctaatattcagagggaaagaagatgaagttactttcaatatcggaggggttgtacacaacccctgtgatattgctgctagtatccaggaagaaaggggattatgttactccccttatagcagggggtatacacctcccctgtaatattgttcctaatatcaaggctgggatatacgtggggggaaggatgatattactcccaatatcgcaggggttatacaaccttctgtgatattgctcctagtaaccagggcagaagaagatgatattactcctaatatcgcaggaggtgtacactcccccattatgttgttcccaatatgcagaaaaggagaggatgacattattgccagtatcgcagggtgtgtacaccacccctgtaatattgttccaaatatttagggggagagaggatgatattactcccaacatcgcagggggtgtacacacatcccctgtaatatagttcttaaaatctaggggaaaaggggatcttatttctctaaatattgcagagggtgtacactccccggtgatattgttcctaatagccgggagggagataattaaattactttcaatatctcagagagtgtacatcgcccttgcgatattgttcctaatatccagagcaaaagagaatgatattactcccaatatcttaggagtgtacatttaacctgtaatattgttcctaatatccagggggaagagaatagtattactgccaatatcgtaggggttgtacaccttttctgtgatattgttgcaaatatttagtagagggaaagaatattactcgcaatatcacagggaatgtatacttcccctgtgatattgttctgatatccagaaaaagagagggtaatattactcccaatattgcagggggtgtacaccccccttgtgatattgatcctaatataaaggaaggaagaggatattactcctcatatagaaggggttgtccaccccccttgtgatattattcctaatattcagggaagcagaggatgatattattttcaatatcacagagggtgtgcagtccacctgtgatattgttcttaatattcggggggagaggatgttattatgcctgatatcgcagtagaggtacacccctcaagtgatactgttcctaataaccaggggtgaagaggatgatattactcccaatatcgcaggtggtgtacacccccccatgatggtttctaatatacagagggggagaggaaaatattactcccaaaatcgctggaggtctacaccccccttgtgatattgttcctaatatccaggaaaggaaacgatgatattactgtgaatattccagggggtgtacacccgctttgtaatattgttcctcatatccagggtgtggagaggattatattactcccagtatcgcagggggtgcacgacgcccctgtgatattgtttttcatatccaggaggggagattattatcaatatggcaaggggtgaacaccccctgtgatattgtacttaatagttaggttggcagaaaatgatattagtctcgatatcgcagggggtgtgcactccgcctggtgatattgcttttaatatcaagggggagaaaatggcattactcccaatatcgcagggggtgtacaccgctcatgtgatattgttcctaatatccaggtggagagaacataatattactcccaatatcgcacaaggtgtacacccctcctgtgatatggttcctaatatccatgggaggagatgatgatattactcccaatatcacaggggatgtacaccacccttgtgatattgttcctaatatccagggaagaaaacgatgatattattgtgaatattacagggagtgtacacactccctgtgatattgtttttgatatacagggtgggagaggatgatattactcccaatatcacataaggtgtacaccccccgtgatattgttctaaatatttcggtggggagaaaatgatattagtctccatatcacagggggtgtgtgctcctcaggtgatattgtttttaatatcaagagggggaggagattatattactttcattatcacagggggtgtacacccctcctgtgatattgttccttatatccaggcgaggggaaaataatattactctcaatatcgcaggaggtgtacacaccccatgtgatattgttcctaatattaagggggaaagaagataatattactttcaatatcacagggtttgtactcctttcttgtgatatagtttttagtatccagggggaaagagcatgatattactcccattgtagcaaggggtgtacacacctcctgtgatattgttcctaatatccagaagtggtgaggatgatattactcccaatatcgcagggggtatacaccccacctatgatattatttctaatatccatgggaaaagagtatgatattacacccaatgtcgcagagggtgtgtatttttcctgtgatattgtttctaatattcaggcggggagaagatgatattactctcaatatagcagaaattgtacatccccgctgtgatattcttcataataatcagggaaaaagaggatgatattactaccaatattgcaggggggttacacttcccctatggtagtgttcctaatatccaggaagaaagaggatgatattaatcccattatccaggaagtgtacacccaccctgtcatgttgttcctaatatccagcagggaagaggatgatattacaccccccccccgtgatattctccttaatatccaggaggggagaggctgatattactggatatatagcaggggtgttcataccttctgtgatattgttcctaatatccagaaaaggagaggatgatattacttccaatatcgcagaaggtgtacacctccctgtgatattgatcctgacattcagaaggggagaggatgatattactcaaaataccgcagggcatgtgcattcccttgtgatattgttcctaatacccagaagggaacaggataatattactttcaatatcgcagggagtgcacacccccctttggtatggttcttaatatccagaaggaaagagggtgctattactttccatattgcaaggggtgtacaccccactgtggtatggttcataatatccaggcagggagagggtgctattactccccacagtgcggggcatgtacaccctgctgcggtacggttcctaatatccagggggagagaggatgctatgactccctatatcgcggggtgtgtacacccctgtgtggtatgttttgtattctccaggaacggagagggtgttgttacccctcatatcgctggaaatgtacactcccctgtggtatggttcgtaatatccaggggattgagggtactgttacccccatactccccatatcgtggggggagtgcacctccctgtggtatggttcgaaatatccagggtaagagagggtgctattattccccattttgcaggaggcgtacacccccctatggtatggttcgtaatatccggggtgaggggatgctatcaaaagaagagagaaagagaccccccatattgttctatattattttatactcagtacctgttttaagaagaaacaaggaagtgaaaccaaaagcaggcagcccggcgccaggcaccagacccaaaaccagacccgaaaccaggcctgggcctgcctgaccttagcctgatagttaaaattcaacccatgacctagcaaccaatgttatccatagattccagacattgtatggaaggacattgtgaaatttcttgttctgtgctgtttcactctgattaccggtgcctgcagcccctgtcacatacccactagattgctcaatcaatcatggccctttcatgtaagatctttagtgttgtgagcccttaaaaaggacagaaattgtgcactcaacaagctcggattttgagacgctagtctttcgatgcttccagctgattaaaagccacttccttcactacctcggtgtctgtggggttttgtccgcgactcctcctgctacactatgactccccatatcaaggggggtgtacacccccctgtggttcgtaatatccagcaggggaaaaggtgctattactccccatattgcagggagtgtacacccccttgtagtatggatcgtaaaatcaaggggggagggaaggtgtaattatccccatatctcagggggtgtacacccctttgtggtaaagtttgtaatatccagggatattacagggatattatccccaaattaatacttttataatttcttatgcctgcctttactgcaatctctgaacataaattgtgaagatttcatggacatttatcacttccccaatcaatacttttataatttcctatgcctgtctttactttaatctcttaatctcatcatctttgtgagctgaggatgtatgtcgcctcaggaccctgtgatgattgcattaactccacaaattgtttataaaacatgtgtatttgaacaatatgaaatctgggcaccctgaaaaagaacaggataagagcgatgttcagcgaacaagggagataagcataaggtctgactgcctgtggggctgggcagaacagagtcacatttttcttattgcagaaaatgagtaggagaaatatcactgggaagggaacgcattcctaggggaggcctatggacggccgctctgggggtgtatcccttatgtggttgaagataagggatgaaatacaccctggtcccctgcagtgccctcaggcttgctaggattagaaattccagcctggcgaattctagtcagaccagttctctgctcttgaaccccgtttcctgttaagatgtttatcaatgacaatgcgtgcacagcaggacatggaacctcaatagtaattccattttctccctggccttgtgaccttgctaggcccttctgcccttgtgatcttttattgccatttgaagcatgtgatctctgtgacccactccctattcgtatccccctccccttttgaagtccctaataaaaacttgctggttttgcagatcaggtggtcatcacagaacctgccgatatgtgatgtcaccccggaggctcagctgtaaaatttctctttcgtactctttcactttatttctcagaccaggtgacacttaaggaaaatagaaaagaacctactttgaaatattgggggctagttcccccaatagacattgttcctaatatccagaaaaaaagaagatgatattactcccaatatcacaggggttgtgaaccccacctgtgatatggttcctaatatccaggaagggagagaatgatattactctccatattgcagggggtgtgcacatccctgtgatattgttcctaatatccaggggaggagagggtgatattactcccaatattgcaagggttgtaaactccaccctgtaatattgctcctaatatttaggatttagggggggagaggataatattactcccaatatcgcaggggatgtatatgccctctttgatattgttcctaatatccagggggggagaggataatattactttccatatcacaaagagtgttcacccccctgtgatattgttcctaatatccaaaaaggaagaggatgatatcaatcccaatatcacaggaagtgtacaccccccccttttatattgtttctaatatccaggggaaatgagggtgatatttctctcaatatagcagaatgggtacactccccctgggatattattcctaatatccaggggaaaaaaagaggttgatattcttcccagtatagcagggaatgaatacaccctttgtgatattgcttctaatatcaaggggaaaagaggatgatatgactcccaatatcacaggggatgtaaacctgtggcgttgttgctaatatcaaggagggaagagtatgatattactcctaatgtcgccgaaggtgcacactttccctgtgatattgttcctaatatccaaaagggaagagaatgatattacccccagtattgcagggtgtacaccacccctgtgatattgctcctaatacccaggaaaaaagagaatgctattacccccaatatctaaggggacgtataccttccctgtgatattgtttctaatatccaagtggggagaggatggttttactctcaatattgcagggagtgtacactccccctgtgatactgtttctaatactcgggctgggagaaatagtattactcccaatatcgcagtgatattgtttccctgtgatattgtttctaatatctagtgggggagataattatattactaccccatacacaggggagggtgtacattcccctgtgatattgtttgtaatatccagggaaggagaggatgttactcccaatatcacaggggttgtacaccccttttttgatattgttcctaatatctggggggcagagaattatattactgtcaatatcacagagtgtgtacaccccctctgttatattactctttatattcagggcggtagaggatgatattactccctatatcacagggggtgttcacccctcctgtgatattgtttataatatctaaggggaaagaggatgatatcactctcaatatcaaaggaaatgtacacctttcctgtgatattgtttttattatataggggggcagaggatgatattaagaacaataccacaggggatgtacacccacgtattgatattgtccctaatatgtatggggaaagaggacagtgtaactcccgatatcgcagagtgtgtacacccccttgtgatattgtttctgatatacacggggagaaaagataatatttcttccaaaattgcagggggtgtacaaccccctgtgatattgtttttaatatccagtgggggagagaatattactcccaatattgcagggcgtgtacacaacccctgtgatattgttcctaatatccagagtaggggaggatgacattactttcaatatcgcaaggggtgtacattcccctgtgatattgctcctaatatccatgaggggagaggatgatattattcctaatatggcaggggctgtacaccttccctgtgatattgtttctaacatccagtgggggagaaaatgatattactccctatatcacagaaggtgtacactttccctgtgatattgttcctaatatccagaaggggagaggataatattactcccaatatcgcaggaagcttacaactcccctgtgatattgtttctaatatccagggaggtagggatgatattactcccaatatcgcaggggatgtacactcccccgtgacattgtttctaataaccagggggtgagaggatgatattacgcttaataccgaagggggtgtacacacccttgtgatattgtgcctaatagccagggggaagaaaattatattaattttaatatttatggggaaaaaggatgatattactcccaatatcacaggggctgtacaccgaccttttgatattgtttttaatatccagaagagaagaggataatattgctcccaatatcagaaaaggtgtaaaccccttctgtgatattggtcctaatatccagggagggagagaataatattactaccaatatcacagaaggtgcccacccccaaggtgatattgctcctaatatccaaagataatagggtgatgttactcccaatatcacaggaggtgttcacaccccttgtgatattgtttctaacgtacagggaagggagaggatgatattattcccaatatcacaggaggtgtatactcctctgtgatattgattttaatattcggggggaaaggatgatattactccctatatcgcagagggtgtacaccctctgtaatattgatcctaatatccagggcgggataggatgatattactcccaatatcgcagaaagtctacacaacccccagtaatattgtttttactatccagggggaagaggatgacattactcccaatttcacagagtgtgtacactcaccatttgatattgtttctaatatctagggggagagaatatattactcccaatatcacaggaattgtacaccacctctgtgacattcttgtgaatatccggggaaaaagagaataatattactcccaatattgcagagcgtgtacacccctccatgatatcgatactaatatttttttaaagaggatgatattactcccattgtcacaggatgtgtacaccccccttgtgaaattgttcataatattctggggggagagcataatattactccccatatcgaaaaaggtgtccaccctccttataatatggttcctaatatccaggatattacttaatccaggatacttgtaataccctaaatatacaattgcttgaacctccacctcccaggttcaagcaattcttctgcctcagcctcccgagtagctgggactacaggggcacaccaccacacccagctaatttttttttcttgtatttttagtagagatggggttttgccatattggccaggctggtctcaaactcctgaccttgtgatctgcccacctcagcctcccaaagtgctgggattataggcgtgacccaccgtgccaagccaggaagaggatgctctatagatttccccaataagagatggctttgcagggccattccaaaatatgtcaaagaaatacatttggggataaaatactttgatttcctttagggaatgttatctattatgtgatgctataccagagtcaggttggagtcggttatcttattgcaacaaagagtctgttccgtcactgttgggatctctattttttcctcttatttcttgagacagggtctcactctgtcacccagtctggagtgcagtggtgcgatcttcattcactgaaacctctgcctcctgtgttcaggtgattctcgtgcctcagccccttaagtaactaggattacaggtgtgcgccaccacacccagctaatttttgtattttcagtagagatggtattttgccctgttggccaggctggtcttgaactcctggcctcgtgtcatctgcccacctcgacctcccaaagtgctgggactgcaaatgtgagctattgtgcccagccaggatctctgttttaatgttagtgctggtcactttgcatgaactccaaagggaagaaatataatgaggtgtgtctgaccccctgccttctcatcgtgacctgaattagtttttcaggtttgcaggggatacccttggacaagaaggggctctattcggttggttggggggattagaattttactttttgtttacaatatttctcctgaaagagttaggggctcacaaggaatttccgcgtgagcaacttatgaggaaagccatctgggaagatatgtgtccttgtgtcactgggatattctcgtttaccccaatgatacggcaatgacgcagggttgtgaaattacagctatgtgtttggggaaaaaagaaagcaggattgtgtgactacgtttccaaacttcacttgcccttagccatagtgagttgggggcctggagattctgttttctttcacaatgatatagatacaattaaatgtatagaaagcaaaaaaataaaaaggtgagtaatgaggaacctctgattcctgagtggccatgtagttacccatggcacagagccacagttactgaaggtaaagtttgctggggaatttagaaatgaatccagctcttggaggagtcagtttactggatgcctaagaaaatgcaaacaaaataagaaaaaagggtaatattcaatcccatagttattgttacctgtcatagctaaagtaaaattaaaacagagtgctggcttcaatcttgatgctacactaagcttagatttcagtgaatgtgagtctcagccactagctcagagccacctcccaaagaccaaatcatgtagggacaatagaaagtacttctgagaattgtggttaccaagaacctagtaactgttggggaggagcaaaacaaagtacagaaaccagagggtacaatctgagtgagactgctatcagcttctggaggagcctttactaaaatgaatgatgagagtaactggatgatgagagtaactaatggatgatgagagtaagcaatgtctttggttttcttttttttttttttttttttttagcagacgtctcactcttgtcgcccaggctggagtgtaatggcatgatctcgcctcactgcaacctccacctcctgggttcaagcaattctcctgtctcagcctcccgagtagctgggactacaggcactcatcaccacacctggctaatttttgtatttttagtattttctggtgagggtccaggtttccggaaacaactcagagacatatgttaagatgttatctttagttttcacagggaaccaaatatgttacgactccaatttccttggctattgttttaagttaccattaccttctcgttgatcaagttgctcatttacttctcaagcctagctagatgcctggaatttcccttgaaggaagtcaagattttcctttatctccatactggctgatggtgatcgagtaagcccctaagaggggtccctgctccatctcgagatgctgctagattctacagtgcctaataaacagctctcgcctggccgacaaagagctgcttgctctctggatagcaattccaaagtgaacagacaacatcctgtttggaagactgccactctgttagaagaagcatcaggaaaacctttcttttgagctatttataactaacagcaattgaccaagtatacttttgtgagtgaaactgacctttctccctgtaagaattctccaaaatttggaaactatttgtgagtatttttacttatggcaatataattattggcacaagctcaatcagattcggttttctttcgtaacaggaaccattggagatactcattactctttgaaggcttacagtggaatgaattcaaatacgacttatttgaggaattgaagttgactttatggagctgataagaatcttcttggagaaaaaaagactgggtatattttcaatatgctttccttttaaggtccctcacctgtggaaagtaaagaatgtcactttctgacaggctcaggaacctcaagttatgtagggatctcaagaagatgggggaattcacccagttcatacaggtgaaattgctgttgcaaagattatgaatatgagagaagtccagcatggctgacttcatctcgtgtctggcctcaggctggctgcccttgctcactcttgggcataggccaagctagccatgggaggaatttagtttatagtttaactttgaagcacggatgataatagtctctccctaaaatgaaccccttccttgctcagggactgaaactacctttgtatgacaaatgaaagcccacaagattaagattatgagaggggcctgaattctgctaaaatgcaggtgtagctgactgataacaagtcattgtcccacagcttgcctttctataatctcttgcttctcaggagtcacatggccagaggtcctgagatttccagtcctgtgacccccacccagagatggacttagtgcatgaggaccattttccacacccctatgatttcatcctcaaacaatcagcagcaaccattccctagccccctgccttccaaattatccataaaaatcctagcctctgagttattagggagattgattaataatcccagtcctaccccttgggttgctctgatttaattaaaccttctctactgcaataccacggactcagtaaattggttttgtctgtgcaatgggcaagaagaacatgttgcatggttatacaggtactacaagcacagtctgatggcaaattattggttttgcttcctgcccttgatgtttctaaacatctagtccaaaattacttgtgaaaggtccagcaaagccaattttaaaagaggctatatggccaatcactattctttctacacattattgcaaataatcaggccacggctgggcacggtggctcatgcctgcaatcccagcactttgggaggctgaggcaggatcacctgaaatcaggagttcaagaccagcctaggcaacatgataaaaccctgtctctactaaaaatacaaaattagccaggcatggtggcatgcacctgtaatcccagctacttgggagactgagggaggagaatcacttgaacctgggaggcagagattgcagtgagctgagatcacaccactgcactccagcctgggcaatagagtgagactttgtctcaaataataataataataatcagaccaagtataatgaaattaaaatttattttgcaaataaattggtcctactacaatttatccttcatagaaatgtggaaactgaagataaaaaaaattaggtttcagaagaaaactatactacacctgttattagattctagccctaaacattgtttttgaggtttttattatttacctgcaatttggtctaaattctgaattatttcctgactacaagtatccaaggaataaatgggttttctttttctttatgatagttttagttggcttctaatgcaacaacaatttttattgtaatcctgtgtgcattctattcctactattcaaattattaatgttatagatctttcattgtagtacttctgaattaaccaaaatcacagtattctgaagatgattctacaaagcctgctgtttctacaaaggctgctgatgatttctacaaagcctgctgtagtgttgctgtggcctctgcttaaaaaagtagaaaacacattgatgcagcatgttcaccccaacctccctgcctaaaggctcagggaccatcttggaagaggaaggcgcgtgagattgtaagagccgaattagggggatggagtgtggagaataaggacacttcatcttggatgctcacctgccaaattgacttctgatgaaagccagctccagaaatgtgcctacagttactactttcacctaaaccctgcccttagtcaaatccttctcttcttctaagcaatcaacttcaattccttgtataacccacagtataaaagggcttttataccattctatcctattgcatgtaagccttgggtctgggaggtaacagtgtgggattccaccatctcatctccctgccacccaaacatgcctgctcttctttaagcaatattaaatgtttgtacttcagaaatttgatttgtcagcctcttcttcagactctcagcttctttggcctttgggagtaaatttgcataggcctgctcaaaacaggatgttctgggggtttgggggtgttgttttgttttgttttttgttttgtttagagacagggtctcactctgtcacccaggttggagtgcagtggtgcaatcatggcacactgcagcctcaaactcctaggctcaagcaatccccccaccttggcctcccaaagttctgggattacaagcataagccaccatgcccagccctggacttttctttaaagacatttacacagtgtaggaattactgtgggtgcactgctcaggtccccttctccaggatgctcattcctacctcatagatgattttcctgcagagatttgacctcagctgaagggcagtcacctggtccaggtggttgctattcacctccttcctgagaacagccaacagccagggacacgctagcacagagatataagagcgaccaaggtgaggccccttctgtgctgcggtgcatgctccagagcctccctgggatcagacttaagagggtctccagccagatctggtcttcgctgctttcctcgagctccccagcgcactcctgcaatgcatcttttttttttttttttttttttttgagacggagtttcactcttgttgcccaggctggaatgcaatggcgcaatctcagctcaccacaacctctgcctcgcgggttcaagtgattctccttcctcagcctcccaagtacctgggattacaggcatgcaccaccacgcccagctaattttgtatttttagtagaaacgggtttctccatgttggtcaggctggtttcgaactcctgacctcagttgatcctcctgcctcagccttccaaagtgctgggattacaggtgtgagccactgtgcctggcccaatgcacctcttgaatcacctcctcatgctttgcttttagagaacatgatccccaacatgtgattccagcaaagattctagaaagccaaccgtgacaatcacttctgggtttagatgacccccccccaccacaagatggcagtgagcacctcatcacagaggtgctgatggtctgcagcaccgcgccaggccagaacgtgccttttacagaagaaaataacccagtagctgactaggatggtgaggagggctggtgagcactgcggtagtgagagggacactagcatcactgagatgcaagtgatggtcatttttcataggtcaaagctcaaagcaggggacagttacagggcagggcttcatagcaccagtgtgatgaaagtatctgggagtggctaaggccagcactatgccatgggaagcaaggtgggcctgaggaggaggcagcagcgtcagcctgcaacaagtgggggctgccctgcagagacctaagagtcatgttatagagcacagtgtctgtaaggccaagaagtgtggacagccaagtgtgtcaattactagacatactcaagaggagcaggaagggcagggcatggtggctcatgcctgtaatcccagctacttgggagactgaggaaggagaatcgcttgaacccgggaggtgaaaattgcaatgagccgagatttcgccactgcactccagcctgtgtgatgggagcgggactccatctcaaaacaaaaaaagaaaaaggaaaaagaaaaaaagaaaaacctaggtatacttctcaagcaaataaaaataatcaaaaccaatatcatgcccgggcacaaatttcatatatataacagatttaaatatatgagggtgattatcctctcatatctccatttttttttgtttttccatttttttctttactaaaaaaagttaatgccaatgacacacaatttttttttttttttttttttttgagatggagtctcacttcttcgccctggctggagtgcaatggcgtgatctcgactcactgcaaagtctgcctcctgggttcaagcaattctcctgcctcagcctcccaagtagctgggaccacaggagtgagccaccacacccagctaatttttgtatttttaatagagacggggtttcaccatattggccaggctggtctcaaactcctgatctcaaataatctgcccgcctcggcctcccaagattctgggattataggcgttgagccactgcgccccgcctatgtatgattttttttttaattttattttcataagtttttggggaacaggtggtattttgttacatgagtaatttctttagttgtgatttgtgagattttggttcacccatcaactgagaagtatacactgaacccaatttgtggtcttttatccctcacccccttcccaccctttcccccggagtccctgaagtccattgtatcattcttatgcctttgcatcttcatagcttagctcttgaacccttactttctgtttgagggagaagacatatcatctacaagtagatactgtgtaaacattccattgcatgactatcccataacttatttattatttgtgtttggttatttgctgctatgtaacaaccccactcccaactaaatggtgtgacaattccatgattctgtggatcaaaaattctgaaaagtcaaacccaaggagttttgtctctgctccatgatgctaaagcctccgcaggggtgaggcgaatggctcagggtgactgaaaagctcagggttggaacagctggggatgaggcctctatgtataagatgattcttcactcacaggtctgaaactatggtggggacagccagaaggctcggctcagctgggacagtcacctgagccctacacatgacctctccaacatggtgatcctgaagcagttgggtttcttacacagcatcacacttttcttttttttttttttttttgagatgaaatattgctctatcacccaggctggagtgcagtggcacgatctcagctcactgcagcctccgcctaccaggttcaagcgattctcctgctccagcctcccaagttgctgggattgcaggcgcctgccaccaagcccagctaatttttgtatttttagtagagacggggtttcaccttgttggccaggctagtcttgacctcttgacctcaggcgatccgcctgcctcggcctcccaaagtgctgggattacaggcatgagccaccgcgcccggccaaagctcacacttcttatgattcagccttagatgtcacatcagttcattttccccacacttattagtgttagaagtcacaagcccacccatactcaggggactggcacacagaccccactctcaatggaaggggtgggacaccaccattcctgctgatgggcatttgggtaacttcctgtttgaagctattaagattgggctgctgtggccgggcgcagtggctcacgcctctaatcccagcactttgggaggccgaggcgggcggatcacgaagtcaggagatcgagaccatcctggctaacacggtgaaaccccgtctttactaaaaataccaaaaaaaaaaaaaattagctgggcatggtagcgggcgcctgtagtcccagctactcgggaggctgaggcaggagaacggcgtgaacccgggaggcggagcttgcagtgagccgagattgtgccactgcactccagcctaggcgacagagcaagactccgtctccaaaaaaaaaaaaaaagattgggctgctgtgactattctagtaggtgtctttggtgagcgcctacacgtgtttctctttttctctttagtatatgcccaggaggggaactgctggctcccagataccgtatgttcagggtcacacacacttccacagggttttccaaagcccttgtaccagcacgcactcccagcacctgtgtgactgctccagctgtcccacagtctcatcagttctattgctgatattttcattttagcttaagttatatttaataggaaaattaccgttgcctctgccccccgttcctgcctgtaggagtttctcgtagctgttgctacaggtggccacaaatctgtcacttaaacccacacaaattgatgtccttatggctttggagtcagaagtgtcaactgaaggtactagcagggctgtactgacctggtggcctcagggagcatctgtgctgcttctccaccttctagaggctgctgcatccctcgctccagccccttcctgacaccactcaccctcctacttctgttatcacatcctcaccttctctgtgttcagggctccctctgtctctctcttgcaagcacacttgggattccattgagggccacccacataacccaggagaatttctccacctcaatatccttaacaactgcagagcccttttgccataaaagttaccattcacgggttccagggattgtgacatgggtagctttaggagtgattattcctgcctgtctcccgctcaccagaacttggactttctctctcaacaggagccccctgtgtgggaatagcctgtctcaacgacgccctctataaggacctgcttcctcaaaggacctcatagtcgggtcctgcccctcagtgtccagtctgccttggctggaggggctgcaggggtgtgttggcgccacctggtggagacagggcatcacagcaggtgggagcccagtagaagcacaaccaaaacatgggtaatgtttaaaattttctggctaagcgctgtggctcacgcctgtaattccagcactttgggaggccgaggtgggtggatcacatgaggacgggagtttgagaccagcctggccaacatggtgaaacatcccctctactaaaaaatacagaaaaattagctggacatgtggcgcgctcctgtaatcccagctactcgagaggctgagacacgagaatcgcttcaaccccggaggggttgccgagatcgcgccactgcactccaggctgggcgatagagcgagactctgtctcaaaaaaaaaaaaagaagaggggaggcgaggggaggggaggggaaaagggggaatttgtttggagctgagacatccatcttctcctgacctcagatatttgcactcctggttatgaagccttcacacttggactgaatacaccaccagctttcccgatttccagcgtgcaaatggcagatcgtgagacttctcagcttccataattacatgagccaatttatatatataaattgggtcctccagaaaaacagaataaattatatatataattatacgcataacttaattaaattatacgtataacttagctatatatataatttattctgtttttctgaagaaccctactgacacaaatgttgagcatcttttcatgtgcttattggcttaataacttgtacatcttctttggggaaatgtctattcaagttctttgcccattttgtaactgaactattaatatttgtctttacattgttgagttgtaaaagttccttatatattctagatactagagccttatcagatatatttctgcaactattttctcctaatatataggttgtgtttttattttctttttctttttttttttattgagacagtctcactctgtcacccaggctggagtgcagtggcatgatcttggctcactgcagactcgacctgccaggctcaagcaattctcccacttcagcctcctgagtagctgaggttataggcacttgccatcgcacccagctaatttttgtattttttagtagagccgaggtttcgccatgttgcctaggttggtcttgaactccctgcctcaaagcgatctgtcagcctcagtctccctaagtgctggaagtacaggtgtgagccacagtgcccggccatctattttcaatagtgttttttgatgtacacaggtttggaattttgataatgttcaattcatccatttttttttttttttttttggttctttctactggaccaccactcttgagccctctaatccaacctccacgcggcagccagagggagctctctaaatgtaattactctttccctgctccacctgctcaaaacagtgtcacatttgtgatttaaaacagtatttctcaaacctaatttgcaaacaaagcaggtggaactcttcttgtatgcacagcatctgatttggttggtctggcatgggtctgggagtgagcacacctaccaagcggctgctggggtaacttgcgttttccactgatgatttcagcaatgtttccggtcccacatgctcctccagaaccttgtactcccccatgaaaaggtggagtccatttccccttcctttatttatttttttgagacgaagtttcactcttgttgcccaggctggagcgcaatggcgtgatctcagctcaccgcaacctccgcctcctgggttcaagcaatgcttctacctcagcctcccgagtagctgggattacaggtatgtgccaccacgcccagctaattttgtatttttagtagagacggggtttctccatgtcggccaggctggtctcaaactcccgacctcaggtgatccgcccgcctcagcctcccaaagtgctgggattacaggcgggagccaccgcgcccggctatttccccttcctttgaacctgatcaggacttgacgatggcatcaacatggtgagagtgaccctgcatggcttatgaggctgggttacacaaggcgatgttgcttctgactggctccctctcaggatacatgcccttggaacccatcctctaagctccttgggagcccaacttagcccatgtggagacaagacagggagagaaacagaggcacccccagccctcagccagcatcaaccgccagacaggagagcaaatgcgccaacaatgattccagctgaagcctcagacagcgtggagcagagatgagggatccctgcagattgcagatgcgtgagcaaaatgcatgctgtcactgttttgaaacaacaatgtctgggggctgtttgttatgcagcaatagacagctgtaacaatgctgttactgctgtattccatgaatgactgcactttgagtagcagggggctagatcactagataagccccatggcttctgtgtatgctatttttctacttttatatccttttcattcactttttttttttttttttttgagacagagtctcactctgttgcccaggtgggagtgcagtggtgcaatcttggcggactgcaacctccacttcccgggttcaagcaattattgtgcctcagcctcctgagtagctgcgactatagatgcacccccatgcctggctagtttccgtatttttagtagagacggggttttgccatgttggccaggctgatctcagactcctgacctcaggtgatccacccaccttggcctcccaaagtgctgggattacaggcgtgaaccactgcacccagcctcattcactttctttacttggctcatttttccttgttgcctcaattctcctctaagatcactttcctgacatttcagcctgggcctgttgccttctctgggtcccctccgcctcctgtgcctcccccatctcagccttgatccctcagattatacttcctctgtccccaccctgaccatcttggctgtccctggatagggatgggtatcttctcccactggtctgggagatctggaaggacaggcctggaaaagacttggtcactgctggaaggagctcagttagtgtggtgctgaggacagtacgggtgaggctggccccttcacccaaactcccactctcttccatagatttcacctctgtggcccaggccataggattagggcaactccccttaaacatcgagtccatcctccaagctgtccttttttttttttttttttttttttttgagacagagtctcgctctgttgcccaggctggagtgcagtggcgcgatctcggctcactgcaagctccacctccagggttcactccattctcctgcctcagcctcccgagtagctgggactacaggagcctgccaccacacccggctaattttttgtatttttagttgagacggggtttcaccgtgttagtcaggatggtctcgatctcctgacctcgtgatccgcccgcctcggcctcccaaagtgctgggattacaggcgtgagccatcgcgcccggcctcatgctgttcttgaatagtgagcacctgttacaagtcgccccaccagcctctcacttgtacccccctcatctctttctccccaagagacagaggaccctggcacttgtgaagcatgacccagaccctggggccatggcatccaacatcctcattccccatgacccctactgtctagatgtagctgccaagagacccccagactccccgggcctctgtctagagtgccaagacagagagagaatgccctgccgcttgcatgctttgtggggtgtccttcccccttccctggctgctaggcgtgacttcaacgttctccccaacccccaaacagcagcactgacaccagctgcagacctggctcaggttagctaatgaggaccaggctggggatggagcctgaacccctaaaccccagtcctgtaccccaccctaatcctggggtctccactggacaaaacgaagcagcttggtttttcgttgttattgtttttgagatagagtatctctctgtctcccaggttggagtgcagtggcgtgatctcagctcactgcagcctccgcctcccgggttcaagtgattcttgtgccgcagcctccccagtagctgggattacaggcgcgtgccaccacacccagctaatttttgtatttttagtagagacagggtttcaccatgttggccaggctggtctgaaactcctgacctcaagtgatttcccagcctcggcctcccaaagtggaagcggcttatttttaaggagaaaactcccgtggaaaggaatcagcacctcctctgtcaacatttcacttctctgaaaagactctcacttccaacagaaagtgctttgtaacacaacaatgaggctgggcgaggtggctcatgcctgtaatcccagcactttgggaagctgaggcgagtggatcacgaggtcagaagttcgagaccagcctgaccaatatggtgaaaccccgtctctactaaaaatacaaaaattagttccgtgtggtggcgtgagcctgtaatcccagctactcaggaggctgaggcaggagaatggcttgaacccaggagatggaggttgcaatgagccgagatcacgccactgcactccagcctgggcaacagagtgagactccgtctcaaaaaaaaaaaaaaaagaatgagaacatatggacacagggaggggaacaatacacacaaacaaaatttagaaacaggtgaaaataattttagtaatatttttactaatactgatatgctcaaaatattattatttcaataagtaatctaaaaattattgagatgtcttatgttcttttcatcatactaagcctttaatatttggtgtgtattttacactcacagcacatctcaatttgcagtccccatgtttcaagcactaaataaccatgtgtgtccggtggctaccatactggacagcgttgatctgaaatcgcatctgtatgcatcaccagcatatttgcagagatccccatctcagcagcacacctgaggctcatctgcgaaagcacctgcaacttctctacaacctcccacatcacctccaaacacatcctcatgtcatctgcaaacacacccatagctcacaggccaatgcctaaatatcattgcaggcaccttcagagaaagcacttactaaaggggtatacttgattccacatctgctttgacctgcaaatctcccttctcctttacatacatttgcatctcatttgtatgtcaatctaaatccactggcagagcctcagatcatcatctcaaagtcaggtggatgtggggctgggcaggcctccaggtgttcctcctcctgcttcctctggggctcttgatcctcctcctcttccttgctgctctcctcctcctcctccaatatggtgaccagttcctcccgcagcgcccccatctccagccccaggctgcacagctgtcccagcagctggacatccactcggcgcaggttcccctgccagtaggaaggggacgtcacagggatgccaccccagagagcaaggggtctctccaggacctgggtgagagcaggtcccaactcatgtcctggccacagcgcctgggcagggtcctcactgtgcccatggaccctaactgccttcctgcttctcagagtgtctcttgatctctaactcttctctttgtctctccatttcattgtccctgacttctctctctctgtctcctccctctcttatctatatctgtccctgtttccctttgtctctgtccccatttattttttgtctttccatgcccctgtctctctgtctttatgtgttgccatttctctgcccctgcctttggctctctttctctcgcttgccctctctctgccctccccaactttctcaaattcagtctgtctctccatctctgttcctgctctccgtctctgcttcccacctctgtccctctcttttgggatctccctgtccccacctctgttcccgtccctcactctatgtctgtctctcggtgtctgtacatgcctctcatgtctctgcttctatctctcagattctgtttttcgatctctggccttctctatttttgttcatttccattcattctcatttcctctctttctctttcccttccaaacccctcactcaccagctcctccctgatccacagcagactatcgcaggcacctccagtgtctgcccctgcagtcctgagggtctgaccagggatttccactggggagacctccctcagggcctgggggggtgggcccagccccggaggcaccagtccagcctgattcagctgcctccacagttccatcgtctctgagctatggctgcaaggagcaggaagtagcaaggtccagggtggcctggtcccctggggagctgtgtgcgtggtggagagtaaagggcagagggagtgggatgggggttcctgggaaaggtatcccaaagtccactcttcagagagaatcagctggccttgtgcttttctttttccttctgaagtctaacctcaactctgctcacagggttcaaacatagcctcttgcagaggtctaactccacccttccctgcctgtctcaggcctgacccctcaggggcgctcagtgtctgtagatgcctggcaccctctgtccttccacctgccccccaccaccacttctccagcctctcctcagcctccatttgacctctggcttgcccatagcttggtccttgcttgtcctcttggcacgggtcatcctagggctttcccaccagtgtgcctttgggggcaggaatggctcccaggggcaccaagacagcaatcccttagctggagtgcctgtgtccaggctgctggcctagggccaagcagccaattctgctgaccctggacttgcctatgggtatattatccctgttgagggtgagggcttctgctgtggaaaagtctgggaagcactgcaggcctctctcggccttggacccttccttcagacccaaggtgcatatatatacatatatataatggtagatcacgaggtcaggagatcaagaccatcctggccacatggtgaaaccccgtctctagtaaaacacaaaaaattagccgggcatgctgccgcgtgcctgtagtcccagctactcgggaggctgaggcaggagaatggtgtgaacccaggaggtggaggttgcagtaagccaagatcacgccactgcattccagcctggcgacagagcaagactccatcttaaaataaacaaatgaacaatatatatatatatgtattttgttttttgagacagagtctcgctctgtcatccaggctggactgcagtggtgcaatcttggctcactgcaacctccgcctcccgggttcaagcgattcccctgcctcagcctcctgaacagctggggttacaggtgcacgccaccacacctggcgaatttttgtatgtttagtggagacggggtttcaccatgttagccaggctggtctcaaacccctgacctcaggtgatctgcccacctcggcctcccaaagtgctgggattacaggcgtgagccaacgcgcccagccccaagtcccttttaccatagaaagtaacatagtcacagtgcccagggattcacaggtatggggagagggttcgttattcagctgccacacccaccttcctaaacctgctgcccttccagtttcctcacgtgcacagccacgcccgtctgcttttagtttctcaatctgttggcttaaccttcaaaacaggcccaggatttgagcacttctcaccattccctctgccccatccccattcatctcttgcctagactgctacagcagcctcttttactggtcccctgcatccacccttgccctctaaggcaagggtccccagtccctgggccaaggaccagtaccagcccctcgcctgctaggaactgggccgcacagcaagagatgagcagcgggtaagtgagcattaccgcctgagctccgcctcctgtcacatcagcagtggcattagattctcataggaggcaaaccctattgtgaactgtgcgtgcgggggatctaggttgcctgctccttatgagaatctaatgcctgatgatctcaggtggaacagtttcatcccaaaaccatccccaccccacccccgacccccagtctatggaaaaattgtcctccacgaaaccagtccctggtaacaaaacggttagggaccgctgctctaaggtacattctccacctggcagaaataatctttacaaaatgtaaatccgattttgacactcccttcttcccactgtgaatagaataaaaccctaccaggcctgcaccgtcagcccctgcccacctctcaacccagtctcctatctctgtctgcaagctggttcccacctcaaggcctctctgctctagaggctacctctccctgcagcgcttttcccctagatctttgaatggctctttccttatcattcacttctacttcaatgtcacctcttcagagaggcctttgctgatggccctacacccagtcacttttttttatctgcttctcatcaaaattgccttgctgattcctttgtttcttattcatcctctcccacatccatcctctcccagcccagaatgttgacttcctgagagagggactgggtctgtcctgctcaccatggtaacctcggcatctagaacagtgcctgccatcacgtggtaggtgctcagtaaatattcttggaactaatgaatgaataattctatccacaagacttcacaatggctcttcatgctgcgatctagctttcaactccaaactggtcttgagatctcacctcagtctctaaccttgacatctaacctcttcacccactctcttacctgaccctaatttttaaaaatgacgtggtcagcttttcagccccctcattccctgtttttaggaggtagtgagtggaagctggaagaataagaaagcttggggagactgcaattgcagtcaggaaagaaaggtactctgccgggaagaacaccccatcttctcctagggaaagattgtggagtcctggggtttgttttgtttttcaattttttgttttaagagacagcgtctcgctctgtcacccaggctggagtgcagtggcgcaatcacagctcactgcaacttcgacctccccggctcaagtgatccccccgcctcagcctcgtgagtagctgggaccacaggcgtgcaccaccacgcccggctaacattttattttttgtggatataaggttgccctatttctttgtggagataaaggctcccctatgttgcccaggctggtctcgaactcctggcttcaagcgatgctttcgcctcggcctccacaaagtgctgggttcacaggtgcgtgagcccgacctgtgtctcgttttgaagctcagggagagggcgctgtgagcaatccctaaaccctttaagagtaaaaagtgcgtgcacctttaagaggacggttagaaaacgcggggcgtggccacaggagaataagttcgcgctgaaccaggagcgtgggataagaccggccccttccggttacgaaaccttagcaagatggcggctccctgggcgtccctgcgcctggtcgcccccatgtggaatgggcgtatcaggggcatccatcgcctgggtgcggcagtggccccagagggcaatcagaagaagaaaaggacaatactccagttcctgaccaactatttctacgatgtggaggctctgagggattacttgctccaaagggagatgtacaaggtgcatgagaaaaatcggtttcgagacaaggagtggatcaggccagataagtatggccatttctctcaggagttctggaatttctgtgaagtgcctgtcgaagctgtggatgccggtgactgtgacatcaactacgagggcctggataacctccgaacctccgcaggctggacatctcggacctccctgccgtgtccaaccctggcctcactcagatattggtggaggagatgctgcccaattgcgaggttgtgggagtcgactgggctgagggcctgaagtcagggccggaggagcagcctcgggacacagccagccctgtccctgcctagcctttagccctgtccccactcacgtggcttctcagcgggctgcatggaatgtctggtagctcaccacacttctggcttccatttgtcttcactcaacgtcagggtgggggagtggtgctggccaatcacaggagagagcgtgagttcccagtatttattcctggctgcccttggctaaaggtcacagctcctgtcaccctgtcaggcagccctttccatgcccctgttcaggcctggggaggtaaaggctcaggctgttagtagccgcagagagccacactcaccttgtcaggagactcttctcaaactgtccttatgtgagtgcactgccatttcttgcagggaccctgactgacacaggggctactactgacactttacagggatggttctcccccgtgcagggccgctgtgcccactgcaggacatgcagcatccttcgccccactccactcactaaaggccagcgcaccccaggccccatagtattgctggttatggatttattgactttatgttccaaattcagctttttcagttggctgttttttgaaaggggataagctttgtcagtagagggcaccgaacaggcattataggaggaaaggcgcctccttcgtggttcttgttggcctccactgaggcacctctctgggaataacgttccccagcaccccaaatggatttccagtcaattcagaagcattttaccagtgaagccctcattattccagttcactgttaaagccagtaattctctatattaaactttccctgttcggtttatggagtataaaccgaacagggtcttgggaagggacagtgtctaagtgtctgggtgccatccagagcatttggcaggggcagctgcaggatgagtgtgttcccaggggagtgagagcagcagctatatggcacttgtttgctactgccctctttttttctttttgccaaacctgaggtgactagtgtcacaggtggagcccatctcaca
